United States Patent Application Publication US 2026/0258423 A1 - sequence listing, part 18

SEQ ID NO: 167803 - DNA, 46709983 bp, Homo sapiens (residues 18,350,355-20,018,568 of 46,709,983)
  source 1..46709983: mol_type = genomic DNA
ggtgactcatttagctggatcctgttggcttcagttaaaaactatattcagaatctgaccttttctcaccacatctgctcccactgatctgagtctcatgacctcttctctagttaggcaatggccttccaccagtctcttttcaacactcttgccctcgcacaaactatctttcaacagatcagtcatgttccctctgcctggaataatctgtgtggctaattctttcaattccttacagttttgattcaaatgtcactttttcaatgagacttactgctcatcttcttctaatttgtaacagcatcttagccccaccctccccatcctcttacaaagcttcatattttcccaaagtacctattcacatttaacacaccaaggaacaattaattatatatatacatatatatataatttcctattctctgttttttcttgctagaatttgtgtttcatgagagcagaaaatttggtttattttgttcacagatatattctgaatgacttgaataaggcctggagctcaataaatgcttcttaaataaaagaacaaaataatacatttgaaggggcttttactgatgactctgaaatatattaaagtagtcactttttactaaaatctatttttattaagttgaaatagtgtgatgaaccatattttgatattctagggatatcattctctaaagaagtaggattagtcagatatatttctatcttgaaaaaaattaactctttaaagtcctttaactaaatgtcactcacaatttatgttaaatcaaccacttaattttcaggtcttaaaatcaggaatattaatcttcgtaattggtcattaataccaaattgcaatgccaatttgcttagaatttttgttaactttagaaactattttattcagtcaataacttattcagaaattacttgagtcaaagttgtagatatttatttacatattcaaaaataattttgcatgttaattacattcatgcactgagaatacctgatatggtttggctctgtgtccccacccaaatctcatctccaattgtaatctacatagtccccatgtgctgagggcaggacctggtgggagtgatgggatcacgggggcaattttttcaatgccgttctcataatggtgagttcccacaagatctggtggttttatatgtgtttgacatttcttcctaaacacactcactgtctcttgcctgcagccacgtaagacgtgtctgctttgccttctgccatgattataagtgtcctgagacctccccagccatgcagaactatgagtcaatgaaacctctttcctttataaattacccagtctcaggtatttctttatggcagtgtgaaaatggactaatacatgccctattaattcaaagttaaaagagactaggtttttgttcctgaaaagaatactgtggtaaaaagaaacaaataagtgagtaaatataatgctatataataggaaaaatggaagaggtgcttagaatatttaagggaaaaaaaatttcaacttggaagttttggacagactttgtggaagttactgtatatgacctgtatccttaatgcctagaaccatagctggttagaggtggcttttaacgtttgtttgaatgagatagtattcttatcagcaagtcatattataagatgaattttgactaagaaaattatataaattcacaacttttcactgtttttttgtaattttccttatacattccttctaagatttgtaactctcacttcagtgattatatttggtattatgaatatgtgttccaagactttcatgattgatcttcccactacaagttccttagcttctaatatttcaccacgatttctggtttctcagcaaaatattattgtctctaatatttccacctggcatcaattctaatatctcattcagatgaaaaatgtacttagaaatcacaaccttgccctattagcatgctttagaatcagacttccatagggcttctcagaagaagcaagtctatctttgtttcaagattatgcaatcttgtatgttgaaaatgctaaggaattctttaaaggaacatcggagataacaaacaaattcagcaggactgctgttgggtctaagatcaatatgcaaaaatccattttatttctgtgcattagcaatgtacaatcagaaaacgaaattaagacaaatagaccaaacttcagaaaagctaattgcctcactcaaatctacttagttaataataagtggcaagtctaggatgacaacctagtcttgtctctaatgacctctgtgtacttttcaacattttgcaaatatatagggtaaaccaatatatttcttgaaacacactcacttttacttgcctgtttgattaccatttttcatttaattaattgaatttttaaaaaacccaaaaagacttttgcatttaatactgctcactttacactgcagtacaacacatacctctttccttttgatttatgaattaaaatccttttgacttctgaattaaatgaattatacctgaagcattgccaaaagtgtggtcaaaattgggtccagtaaaaggagaaaaggtgcttccctgaatcctttcccattcattatcatcatttagatcctggacccagaaacaaaagccatcctcaaagttacaattaattttctcataatctgtgaatgaaaaaaaagaaggaataaaaaaaatttagtccataatgtgagtagttatattagattgtattgaaaataatctaaccttatacagcttatacttcagtggtatgtacaaaatcattattttttattgatcttaactctgttgcattctatttattttttttaaagcagctttttgttgccaactgtgttaaattaatacatttcctatactctgtcagggtattagcaaatataagtttctcattttttaagttttacatcttgtttccattggttcacccacagaaactttgttccatatttttctctctcctgttactaaatttaataccttgatccaaattaagtttatgtagaattttctctgaattagttttatgctagtattttctaacttgcaatgcttgcagcaaataaaattttaatttgattttatagtgatttataagttttctcaaattggttatttgattcctttgaaaaatgtaaaccattgtccaatttctcatttctttttaagttctaagaagagaaagatgcacatacaagatactcattataaaattacatcatgaaaattttagattctgctacctttaaaattccatcataacattaaagcatctaaaaattaaaaagccaaaaaataaataatacttactattaagctcactgctgttaaatgcagtatatgttgcattaaagccaacataatcactttcatcagattctataagaaaggtggcagtaacttggttggaaaaaattcttattgtgccaggattagtttcccaaatagaagctacaaaataaaataaacaactgttatatgtatatatctatctgttcatctctctatccatccatcagtccatctactgaactatcagtttgtcagttgatctatacaaatatctatctgataccacttagttaactaaaagcattagtcttacatttgttttaattaaaatatctcttctctcaaacattagaaagcctcaaattattatacatatttatggtttgataaaaaaggtatttttaatttttaattgttagctctatgcactatatatacatagaaaagatgcattcatttactggcaaagttcatctaagaaacattagttaagcagttttgaaaattaaagtcaacttagctttatcaggtatttactgtgtcccactcacaggggcttaatctgggtaaaataacagaaacaaaagagtattctttggctctttacgcttgtaactatacgacctcaaaataataccaggtgacttaagattgtttctacagcattttatattgatgtaacatttgtctgtcttgagtataaactgcttagaggattttttttttcatttttgattgtcaagagttagtataatactaggattataaaaagcttccatatgatgctttacaaaatcattgttacataaaatttgcttttatgaaaatgtacagcacatacattttcaaagggggtggtcttgcctttagcggagtgaaaattggttttgagggagaaaaacagttttaatttttaaatgtgtaaagctcagatatacccacagtccacgaacagatacacagaatatagtgcatatgaaatattagactttcacgaggagctgttagaaaaaaacaaggcctgaaatggtctcttagtggaggtgataatgaaaaaaagtgttaacaaacaatgcattagcattttagtttgacaatctgagcatggcattagattcaggcctataaaaaataccatacttgcagataggagacaatgaaccactgtgaaataacagtgagttatttaacattgagttctgaaaagagatacttttatgaactattagatatcttgtgattatgtagtaattaggaaacaatgtgatacatacaatggaatttcaacataatctaatagaaaggacatcatgaacaagcattgattcacatcttaatgtttttccccaaaatgtgtgtcatgcattcaatgttttttatgaagaactattatttagactgttgctacggcagcatgcatacctgtgtaattttaatacttctcatactgaaaacctttggagttcataagtgttagtcacttaagggatgtgaacattctagaaactttaaacctatctgcctcttttttcctttttattccatggcaatggaattctcttggacaatggcctctggctggctttgaatgtggttggtggttcaaccacacccttagtgtgttggatttcatagtgtgttggattctcacgatatctaatagaactgtgctagtctaaaaagtccaggagcttaccttgaattccattaacctgcttcagagatacatgaaaatctcctaaaatggtgtagaatatgtgtctgtagagattttacaaaactttcataagatagtcttaaagtctccttgcctaataagagtcccaggactacagatctagtgaaagccatgtatttcacaaatccagggagtagtggagggtagtggttaagagcaggggctccagcatcagtatttgattgagtcttggttccatgtcttactagactactctgtgcctttcttctgtagtgttacaactttttcccataaagatttgtgataaggagtaaaagtaattctcatgtaagacagtgactggtatatactaaatgcttagtgaattctgtcttttgcttctctatctcaccaactaggttgtaaaccttgaaaaggatgagatcatgacttaatgctttctgtgcctctgtcattgtaccaaagcataggagatttttaatcaatatttgagggcatatatcatgatgtgagtaaacagagtaatagaatttgcctacataaacgagacagggtttgtgttgaaagaaaaagaaaacaattacctaatatcttttaaaggatgacttttttcctatatcacaactgataaatttttagacattccttaagaaaatccaatgtcttctactaaaaatccaaaacttttatggatgttaatttgcatagactgatcaagcagtcactcttaaatgtgaattaactcatcatttgtctactaacagcaaaggctctggtgaataggttttgtgaaagaagaaagaagtatgatacagatgtggggaatttggaaagacggcaatggacggggaagaccaactttctacagaataggattcaacagatctagttcaaactacttatattatccaatttataagagtgaaaatgcggcaactagagtaccatctttattataaaataatttctaatatattcaacacgtcttagtgagtgcccactatgaatttagtctggggccaagtgctgatgacatagaaaagaagtaaccagtttcctctattagaagaatttatattggtgagttattaaaaataaccataaaattattatataagggaaaaatgctatgggggtaccaaagaaggaatctttaattttgccaggcactatgattggcgaatctttgagaatttctggaagggatgacttaagcaaacttagtgcttgctaaaataaacttttccacataacatacccctatcaacagaagtgaattaatgggtacttctgagtatacataaaagtgtcctaataaaagcacaaaatgtgttgaaaatgctttactttgaataatatttgcctatattgtttaattccataatgcagtgtgattatttttgttgtaggataagttgacaattcaggaatatacactatgtttattgcatagctttggctatagctatgcacacttctgtgtgcctcaggataagcatggccttacacaatgttaagctacagtattagaaatatattgtcagcagtcctgtgggaatggaataccagctaagcacttgagatataaagaatggcataacaactatgcactcagagacacaattcctgggctaagcattttgaaaccgttttcagtgtgctaacctaggcatttttgttgtctttctttgaagatgcataaaaacatttatagatttttgtgaccactaaattaagtaagctcactcaccgtcttctacccctttcatatgaagtattaataattattacaaccattgaattcaatattataccttcatcattgcaacttaaagaaaacacttttgaaataactttcccagcactctattttgatttacttcaattttcataattatttgaagactgcactatcactttacacaatgtctgtatttctctgatgctttttagcagttagagaacttttgcatcacaattgtagattaaaatgatggaaaaaaatgcctttaggatttgtttatgctgatttccccctaatcaggtatataacaactattttatgatgataattccttacattgtctctatataatcccacttaccctaagtaaaaaatttatatatttccaatattgtacaaataataactatttgagattgtatattttgaattggaatttaatgaaagcaaaccttgtaagcatctttcacataaagaaattgctaaaacatttagggaaagatgagcttgtgacttgagaatgaaagtatctgcattattaccatacaaattaactttacacttatgggaaatactgcttgtttccattgattatacactataataccatatgatagaaatatatcccagttggtgtaaattcaaataaacaaaccttgagtttctacaatacaccagactttgtgctagatgccagttgtaagataatattagttttcttagaaaaaattagaatttttaattgtaaaatttaacacccaatacactttctcacatttttagattataattaaaatatttaattttcaaaactttaaaataaatgattattctgaatatcttaaaattaagcaactacctattataatataactacatattcattgatgttttctgcttggatattcagtttcttattatatttttatggcaattaattgcatattagtcacatctctatggctaaacattttaaaatttattcacaaattgctgataccctaaccatgtgaaaataatatttagacagaccatggtatttgaagagttaagaaacatgagaatatcttatgcctaccacttattcagccctcaacctctaccaatttagattttatcttctgtataatagggatgataatatcacctacataattggtttggaagagcatttagtcagtcaactcaaagtgctgacaacactcctttacacagtgtaggtgaaaatatatggtaaagtttattaatgtcacattagtctttggaaatatttatatgaagtaacctatttgtccacctatgtaaatatttatgttgatcataattttaaaaaactgcatctatcagctatagaaatagattatgaaatggttggcccatttttttttaagagcaaatgtgacttaccatgagttcacatgttttatatatactcattatgatatttttacttgggcttttaaggcacaaagaataatggtattatgtttcaagtcagagagtttgggctttgatttctgcctccaacactgtgaacttatggtaatttaatatattatacctcattttactgttctgtaaaacatattttgcaggtttgttgaaaatattaaagaagaaaatgcacattgattattcagtagagtatcacacaacaatacctaataaaaatgagatattattagcatatgcttaaatatttctcaaatcattaaatctgtaaaaaattattcaataggattcacttttcattacgtataaatacaatttgagaggcaaggttcttaaaataaagttattatataaaatttaatcacaggtgtcaccaaccttatcttagctctagaacagttaactatttctccaacatgcgaggaaaactagttattcccttggcttcgtttccacattctctacctcatcctcactttatttccccgtggaattttgcccctaatttcactggttactgtgaatagatctgtgcattttggggcccggtggaataaaggggcatgaatagaaacatattactagggcattccctgccctcttttcagcttccagccccgtccatgtgtaacgataaatggttatatagtaacaataccatccatccacatctatcatttacttagcctacctccttggctagacagtgttttagccactttattagtaatagcctgcaggagaccgaggagcaggatgaacataaaaaatgacagaacctctgtgagtttataacctacgcaatgcagagaaaacagaatagtaattttcagggattgtgtgaatttggttaatagggactaacatttaaacaatgtatggtaaccaaatatataattataatcctttgacaaatttcacataatttttaagatattaattaggagaggacaatgttaaaacgtaactgctttattatgaagaccacatagagcactaattttctaatttttataatgagaagcaattgttttttttttagttttataagtttcaagtccatattcacttcaaaatcaaagggaaaacataccactccaaaaatttacccacatattttcattttcataagtaattgtatatttgtttcaacttacctcttaaaatcttgcttgatcctacaccttcataaatatctaatatatctgtataatatgtattaaaatcatcgaagctcagtttaatggaaagtccttggtttacactaaattaaaagcaaaaaatagattaccaaatttttaacagttgtcatatttcttaatgcattctagaatttgtatgtgttttcttgtggtgaacaccacataatatgatatctactctcttaaatttttaagtgtacagtgcagtattgccggttatgaacacaatgatgtacagcagatctctagaactctttcaggactgaaactctgtatcactgaatgacaacttcccattgcttagtcctcccagcccctggcaatcaccattctcctttcatttccatgagtttaactactttctatgcttcatgtaaatgaattcatgcagtatttatctctctgtgactggcttatttcacttagcataatgttctcaaggttcttctatgttgtatgatatacaagatttccttctttatgactgagtaatattcatatatatatcacatttcctttgttcaatcatcggattatggacactcacgttctttttaccttttgtttattgtaactaatgctgaaatgaacatgggagtgcagatatttcattcagataaatattcagaattgggaatgctggatcaggtgggaattctatttttaattttttgaggaacctgcacactgttctccatagcagctgcaccatttcaggtcttctcgatatcatttgtggaaaaagactatcctttcccctttgtgttgtcttagcaccctcgtggaagatcatttgatcatatatgtgaggctttatagtgggctttctattctgtctatgtgtttgtctttttgccagtacgttacagttttgattactatagctctgtaatatattttgaaatcaggaagtgtgagaccccaggtttgttattttttcagtttgttctggctattcaggttttgttgtgattccatatacatttttggattttttttctatttctgtaaaaaacctccattggtattttacagggcttgcatttgatctgtacatcactttcggtagtatgaacattttaattatgttaaattgtccaattcatgtatattgttcataccatcaagatgacagctatcatattctataattgttatttacatacttaaatgtctttcctaacagaatttatatgactcaaggacagggattaattcattcattcctgtattatctaatactttgtagaaactagtgcatgctattgatataaaaaaataatgtatctagctgctggtataagagcatagaaggaaaagtgtgacaggttcatcagaaaatttaaattagatatttaaactattttcattttcagataatagtttcagagaggggagacttagtggaacctctatttacaactccactgtctcattaaagtgttataatcagaaatgtaaataactcctccaagtgctttgtaagtaccaagtttctctgaactccttggaagggagatggctaaaagaaataaaagtgtgtacgggagaaaacatctaaggctccttgggcatgagtttggctagatcatctgcaaatggacccaggaaaggattaaaaaggctagtaatacttaagagatttagtttccaaggccaagcaggagccctgagaagtggtctggcctctgactctggccatggaggatactgagtgaacaaggcctacaggcagggacatggcaagattggcttttaggttcaccaccagcagtaatgtggccaataaggcaatcaaggacattcttcacagagttagttaatttttgaaagtctaaaagtcattgttgagaactgttcatttgtggcaagacctcaggttgatcaaacaccatactataattatggccagtggggtggagttcagggctgaagtttagtcttcaagtagtggggttggtgttagtgcaatggcagctactagcagggcagcattaaaagacaactaagcagaaactcagatttttggacctactggtgtttgctgtaagggagataaagttagagtggtggtaggttattaaaaaaaaaacaaacccaaagcataaacctatagacttcagccctgagtatcagattcagcagttccagagtgtattttggaatgtatattttgagaagctccaagggcgattatgatgagctcttaggtttgagggcccttgaagtatgataggtaaatgcaggagatgctacactcatggctactctaagacatgtctggtaaccaccggcagaggtaaggggatcaaggtgagagagcagaagatcatcccagagtagacagagaaggaaagtaaagctaagtttgaagctgtttaaattctgcctctgttatgtcagttcaaggactgggggagtgagcctgctggtgagacctttagagaatctggagtcaagctggaatagacagagatggaagaaagaggcagacttgagagatgatttcttaactaaagttctggtgtgcctgggcaagaatatggtgagtgttttttcatctgatgttttcaagctgtcaatctaaggaacgcaagcatgaggagccccctaggacgctttgctttcagaggacctctgcttttccaaaatagatatttggaggtagaagagacaaaaaagtgcagacgattttccacctccttctgattcagaaaattcaactcacttccaataaaaccacagggatttataaaagtaagattaattggagaacataatcagattttgttataatattagatatttcagttaccttctgattttttgaagggattaaattaaatttctttaaatttaatttatacactttgtattattgtgtcagtagttaatatttttatagaccacttttattgagcatttaatatgtggctaagcactttacattcattatcatatttaataatgacttctttgaacatagtatttagagatgtggaattctacagacacagaaatttggagtcaaagaggtttactcatttgcctgagatcacacatcttgatctgatgatgtgtgaagatcttgatctgaagatcttaatctgaagaagttagatttgaacccacacaaactgtctccaataactatattcttaactattggctgtatgctaactgtggtcttaatgtaattcaaaggatgagctggtcctgctcaaaatatagtttaattgcatcttaaacatttctcctatatttaattgatcttaaaccttatagaaaaattattgtctttagtctcatctgatcactattgggaaagaaaacaactatttgatacaatgcatcactaatataataatcaactttgagaaaaaatagattatttgtgtgattaattaaatcatcattttagcataaagtacactgttttggggtaacatcttaggttcttcaggtttttaaaataatccatttatcaatcatagatttcttaaaatagtttcaaaaattaagtaatggaaagaaactaaaaacaatagggccataacatttttaattaatataggataatttttgcgtaaaggacattatcattacagcagaagtttattgtgtgttctgctcataaaccctctaaatgtgacctgtctttattaagaagtgaacttagcaattaaattatttttatttggtattaataaaatttcaaagattgcataaaaaatagttgtgtacccaattatgcagattagttacagtctttccattttcagtgaaagatatttaagattttctacagctttctattgacattttaaataagtgctagagttaatattttattttcctaatgaccaatgctaatagacatttataaatgcttcttttaagtttgaagtgattatgtgtgtgtgtgtgtttctgcatcagaaaaatgctttatatagatatataaacacatacaaatgtaggttgaaaacaatattctccaacttggttaatttttcaattggcaagaattacttagaactgccatttttaattcatagtcttatttttgacacaccaatagcatgttatctagagcaggaaacaaaggaaattgtgtttttagttgtattacatatctctcaaggggctgcactccaaatcgaaataaaaaataaagggatactcttctttccttgaacaatgccaagtaagtgtgtatagaacaatctttttctcacatctcctctctgggatatgtctacctgggtgattagttattgggccatttcatactgtttggcaagaacctgaggctctgacttttaactttctttaatcagctattatatgtcaatataatgtatcataaatataatcatcaatatcaatcatcatcaatataatataatcacaatgattaaaattatactataggtcagactggtaaaccataatcccatctagctattaatagaaatgaactaattagaatataatttttcatagtgaattctatggagcacttattctgcatgctctgttggggaaatattcagtattttaacaagaaagttttcattggagacttacatcgcatgttaacatatttaaggctataagaagtcctacttttaagagttttaataagtttatttcaggatctcttatatttatgtgagtacaaattctttttatccttggaatatccggaaggaacttaaggtgttccttgtctatgaaaatgcttaggtaaactttaaggtagatcagctatcagcagcctaattattttgattatcttcatgattgggttggttaattgaattaagaatgtggaggtgaaatacatattgactgatccaaatgtctttcaagatatagtaagaaagacatgtatagaggctgttccctgctcttaatctgctgtaactgaatcacacctttagagatttccacatggtaagcagcaaaatgagaaagaaaatattttatagacaaatgcagaagatgcgaaattctacttctcacgatacacagacatacatgtatgttgtttgcctggccgcacatgaataatgtccaccacagaaaaataaacttgcttcagaacccaatgagatgaccccacttattagacagtattgttcatagcacagaatagctttttaaaaggttaaaaatgatagtatagttttttgtacagtttttcagttgggaggtttttgcttcatagttaatgaaaacaatgattctttaaaaaactactgaaagcaataagacgttgcatcagaaaaacgctttatgacttaagaacagaaaatataagatcttgtattaccgtatgatccactggcagacaacacttgtttcagaaggttttggataatgagtagcctggaaagacccagatgatccagttaacaaaaatcttccatcacaaactgtggctgcaaaacgatgccaattaatgttagacaaaaacaatcttgggattcaaattggctgcaaaacatttcacagaatattcatggcaaaacctgtacaaggttattttatgaaactgaaatgatagtaagatttcatgtttgaaacctattagccatgttcaaatactcatacacatcctatcgtgaaatattttggaaaaattctttctttctctctctctctttctctctttctttctccttccttttcccttgcttccttccttccttccctccctccctcccttccttctttccttccttttctctctttctttctctctctttctctctttttccttccttccttccttctttccttccttttctctctttctttctctttctctctctttttcctcccttccttccttccttccttccttccttccttccttccttccttccttcctaccttctctctctctctttctttctcttctttctcttttttcctttttttttttttttttgagacagagtttcgctcttgttgcgtgtgctggaatgcaacggcgcgatctcggctcactgcctcctgtgttcaagtgattctcctgcctcagcctccggagtagctgggattacaggcggcggtcaccacgcccggataatttttgtatttttagtagagacggggtttcaccatgttggccaggctggtctcgatctcctgaccataggtgatctgcactcctaggactcccaaaatgctgggattacaggcgtgagccactgcgccatgcccaaaagcattgtctttctaaacacccttccctaagctgcactttaagtgtattcttccatatttgcaaggaaataaatatatctgaattgaaaactgccagttcagacaaataaccagtcattttttgtcttatttttataattaaattggagctaggtgaatttcaaatatatgtacaaagtgctatgttttcttgaaaaagattagaataaggccaggaaaatgttagtactagtggcctatacagaattccatccaacaaatctgttagtccatcttttaaagctcattactcttgctcctttgggagataactagttcaatgttttctatattttcattcaatactcctgattaagccttttgctttccataattactcattttcctcttttggttttcatagtagatttatttcatgaatctctccttaatgtcatgcattattagttgcctttaatttatatctgaatagattccaactagattaaaatcttcttgaaggcatgaaccaggagccataacttagagatttttgtttttttcatacacttgctatgtatagtatatgcaaaaatccaccttgattttcacaacttttagtctttcttacattattttccttctagttagttacttggttatgttgacacaatattctaaaattatgacccttacaatgtgtctttttctctgcatagattaaaaattcttcatacggagaaacattaatggaggttagaaaaatcaaagtaatatgtcaaaattaatttgctgtgtttggaatctgagtgtttagaataagctaattctaaactgagctatgaaaaagctcatcgtaaaattataaagtgattctatcaaattacataatacaagctattttatgacaaaatattttatgtatataaaataaatacattaaaaattagatagcaaatagaaatcttgattaaaatatcatgtgtttattgggtttttgcttttttttggtatatatatattttcaggtgcataaaaatttactttggtaacttaagtttattattcaaagtctgcttaaaaacaatggcctaggaattaattcattagcttatgatttggtaacctgatttccagaagaaaaaaagaacgaaaataagaaaagaaaagataacaagtcaagaagcaaggattaaattctgaacaatccggcacagatcacaggaaagaaagaaaaatagtggtttgttaactgaattgccttatgcataatgattactgcaacaaacaaagaaaattaaggctaatttgtcatgatttgaagatagatagtaaaatatgtgactttttaatgacttgctaaataattttccagttgtaaaagcaaatctcttttctcaccttcaacgctcttttccactgtaaaccatgccaaacaagcagggcaattaatgccttacattcaaagaccataaaaacaaaaatggcatttgcttgcattttatgtggtatataaagcttttaaatcacagtttgtcgagaaataacatggactcaaagattgtagacagtgtagtaaagtctactgctattgtaaagtttatatttgagttacaatacttaggaagcaatgaggtagggtgctcaatcttatcagtgctaaaatataactgccaacatttatagagtgtttactatgtgccggtcattttctaaagttattatatatgtatgaatgtaatttgcataacaactctatgatgttatgggggaaactgaggcacatatgggttaaataacaaccataaggcctcctagcttacaagcaacaatttaaagcaaggcagccttattctagagcatactgtggtatattgcctaatatcacaatatatatatacatctatcactatcgcaatgacatcacccactctttgaactgaaaagcaggggggaaagcataaataaaagaagaaacagaaaattttttaaagatttccatctttttcaatgttcttaaagttagaatacagatcacatttgcaataatattccagaacaaataggaggatgcaaaagagacacacacagagagagaaagggaacaaaacaagatccctttaagcatctgtaaaaacctgtttgtaaagctgataaaattttagtcatttttcccacctgttcactacgcatttttttgggaaaggtatcaacagctttgcgctgcacaatgtgattcatgatttccagaaagccatgttacgtctctagtttcaaagatggttctatgtttgacaaaccctctttcagttctttcctgagcacatgactaaactacacttccccaaatcccttggagtcagataaggtcatgtgactgagttggccgatgaacgattgtaaaagtcactgtgtctatttccaaatatggtttctgaacatatctgtaacattcttcctttgtcagtcagctggttgtgaaggatccagtagaggactctgggggcagagagagtggcaagtaaggagcaggcatcctgaatgcctagagcacaaccctttgccatctttcttgcaccgtgatataggtgataaataaactgttattgttaagattgtttatcatagtatttagcctgtcctaaagaatatgatcaattttcctgtccagtattctatcatgttactaagttttagtgggaatggatactccacaggtcaaattctgctctaacgaggctctagtcaattcctgcattcaagcaaatatagagaatattcctaaatgtatttaaaataaaattacaggagtattgaagtatttctaatagcaacgctcagaatgccaaaatattatcttctcaagacagaggcttgtgtaaggcactttcttatacatttttttcatttaatttcaggatgtttctggagaacctgatagtgcaaatgaccatgaatgaagcaggataggttttcaggaaaaaatatatgacccagttgtggatgagtaggatgactgggtgtttaggattgtgacttattagactgtgcagtgctttctagtgcagcatcagaaaaaaaaatctaagtagaacataaatgagcctgtcaaattatagcagccattcgattgcactatcagaaatgttgcctgtaataggatggaacacataagggtaagcacttaggacccacgaagaactccctctgctggctgaatattcactaattgtgtctttgctcatggcattcaaatctccaggatatataaatcaaacatgatctatgctcacccaccaagctgtattatgcatatacacgtgaggcatacaaactatgagaacacttgccaacttccaaagagttaagcattggcttaaaggctgtgaatcagcatctttccttttcataggtcagctaaaaagtgaactttcctgctgatgtaattctaatcagaagacgaaaacaatttaaagaaatcttgtttcagctatagtcagctgtaagtgtgcaaacctaaataactaaagagtaaaagaggaagttgcatgaggaagacaatgttagtatgactatcaataacacaaaccagaattagagctcacagctggagcaaaaaaataaataaatcaataagagagagagagagagtaaaggtaaacttcatattggaaaaattctcttaaattagttttataaatttttccatgaatatagattgatggacagtggctttcaggtggaaataatgctgctggaagtttgagctggtgctgaaagtcattaggcttgtgggctcaccataatcaatgaatgaagcaacttaaaatgaataaagcaacttgtactcttaaattctctctggataaaaatagattcattgattgatttaaacaatattatcccacaaataattcgaatttatttaccaaaatagatataatacttacttaaacgaaaaaaaaaaaaaagaaaatcaagaaaatggaaagtgacggtgtgtaagcttgagagagttagtgacatgaaaggctggtcactactaaggttcaattaacaaaaaatcttcatgttactaaaaagtaacaacgcagtttgactatatttttaaagcaaattaagataattacttccattctaatactgaggctcatctcctgagtttagagtggctcataaaaatgattcatagcattaaaacttattttaggacaaattatcacacttacatgatattcctatggttcatttttatatgcactgatattagttcatcatgaaaattatgaactccatgagcataataacaaaataataggtacagtacatttttcaattatttgattcatatattttggtagttatgccttttcctctatttaaggatattgatcatcattatattggcttaaagccatgtgtctaagttgacatacactattgtttttgaaacagaaatcagcatcacctttgttacctcatgatggcacacttgcatcatattctccctgaaaagattttggaaaatgcctgaaagccacagcaaagcaagaacattgctttcttcttctttgagtaacttagttatataaaatagattaaaaatattccgcagcctgcactttcttccaatatgttctgagtgtacttcaaagtctgtagttaaactttaaaggtctgaattttatccaagaacatttgcatcgggattgcttagtggaaatctctgtagtagagttgcctttcattgagttggtaccgggaaacagaccaaatgcctggcttttaaaatgtgtactaagtggataggtagcttttaaaactttggtcgttattagaatattcatctttaattactatcaagcaagatgagaaaagtgtaacaaataatagaaaagtgtagcaaatagtaactatggtctttaacacactttgggcactaactgtatttatagtcagttttaaaactgattataagccataccaaaaaatgtgcagttaatactgttaaataaaacaaaatatcagttagacttatccaaagtcagcagtctccccttatccacaggggatattttctaagacctccagtggatgcctgaaccatggatagtactgacccctatatctactatgttttttcctatacatacacacctaccataggagattaacagcaataatcactaataaaatagaacaattataacaatactcagaatgatgtgcaattttatacttatacattgtttatttctggaattttccatttactgtgtgtcctgtggttgacagcaggtagttgaaactgtggaaaccactaataagggagaactactgtagttctatgtggaaatcttcttaaatgtgttacacacagaaacaaattacctacttagatgctgctttctagtaaacttttctaagtggaatccagctatgaaatgaagaaataagtaaaagagtaaatacgtttaaatcaactagagccatgcttggtatatggtaactgctacttaagtgtcaaatagtaataataatggtaaaataatgttattgtcattaacactcaaaaaatgccaaaatatacaaatgaaacacagaagttttacttatgaggcattaagttcttattcatatcttatttctactatttatagaactacaagaggcaaataaaaggaacagtcaaaattttaatatggtgctcagtgagttaggtactgttaaaatgttgaaagaaaaagactgatatgatagtgaaaaaacatgaaaaccattagtaagaagtgagaatgtctatcacagaagtcaaattaataatagtttggattagtttaatatagagaagagatgaaaatgtagcaacacccatccccacatttatgacagacattgttaatcacatcttcctttctgtagtgatcaaatggaattctgtttaattaattaatatctttaatattatttataaagtttaggaaaatattaataaaattattttaagattttgtattatattttaaaaatagctatttaaatagctcattcttcagtagtttcaggtatttgagattagaatgtgtgtgtgtgtgtgtgtgtgtgtgtgtgtgtgtgtgtgtctacagtgagggaggataaaacagaaggggagagagtaggggggagaacttaccacacattttattgtcttcgtcagaaccatctggacagtttacttctccatcacaaaataaatcagcttttatacacgttagagcatcagtacaaggacttgaaccaggcaggcactctattgagacatttcctttaaaaaataactgaaattaatttccaattgatgagatatgtacaatgtttaaatatttaataggcctttttgccactggggttcttacttataagtatgttcttcaactgccataggaatatttatttcatttgcaaatcaatcatttgtaaaattagagcattttaaattttgaaatttcatgtggggcaattttggaaagcttatcacatcatctgcaacatctagcagccacttcatttactcataagcttattatttgaaaatatagtggcttaagtcaaggtttccattctgtagagtacatttaccaaccaaagtcattttaaagtaagataagcacttaaaattcccagtgcattgtgacattgaacaatgaagaaacctaatagctatttctgttcagtatctctttgttccttgggtcagagattcttagggggtacactgtaaacacacccctgcggggtttcatgccatcttctggagggtatccgaaaaacttgcacctctcagcctgacttgtccttcacttgccccactttcataaacttaagtctagagatgcaccaagaaacacattttacttctagaaattaacttgggaagtttaagagcaattctgaaaataagccatattcttatatgcctacaagataaagacttttaaaaaaaatttttaggccagtgtggaaatttgaatacttctgcctctgaatataacaacaatgatggtgaaaagttttggaactctttaactcatcagcatttttttttctttttggttgttgttcttaatcttaaagccagaactgtattgccatctgctgggttttcaaaatatgaaaatctgaaatttctccttctgctctataaaattaattggaaaataaaaatgcccatgtcaatgaatctactaagttacttcttaattaaaaacttttatagatttttgctgagtctacatacaactaaattagacatttgtaactggctgtaattaaaatgaatataaaccaatgggaaattcatggaacgcccaacatctaaaattataggacagagtaaagatcaaagccattctcaaatgatagagtactcccatgtaggagaataataaataataataaaaatattatttaataaactcaaatgcatatatttgttgatatttaagagctattcatcaaaagtccttaaccattgagttattaatccagaaaacacatatttcatagaatctcatacatgctttataaataaataaaccaaataaagcactatacttaaaactgtgtcttattttacaagtagctaatagaattccaagtattcagcatttcaaagatgaatttgggatacagctaggaacatatatcactttggctgtcctaatgcttctcatgggagctccacttcctgatgtatcacatctctgttcagtatctgttgaactcttgattagaccccaaaaccacaccagcaagtcataccacttggacttgactgatctcatgattaatcatttattgaccccacaagtatttattttgtacacatttttgtcatggaattttaagagacagagataaaagaatgagtaaggcagagcctctctctttttatgaagcttcaagttaagtggggggaaattgtttatgtacaaattatattttaaagagagatttaaaaagtgctatgggggcatcaaagtttaagcaattagtttccttctaaggcaagaattaaagacatttttacagaaatggtcatatttcaattagtttttgatgtacacctagaaaggcaccaggaggagagagatatggaatgtatttagtgatgtgtgaagagtacatcaataggccgggcgcggtggctcacgcctgtaatcccagcactttgggaggccgaggcgggtggatcatgaggtcaggagatcgagaccatcctggctaacaaggtgaaaccccgtctctactaaaaatacaaaaaattagccgggcgcggtggcgggcgcctgtagtcccagctactcgggaggctgaggcaggagaatggcgtgaacccgggaagcggagcttgcagtgagccgagattgcgccactgcagtccgcagtccggcctgggcgacagagcgagactccgtctcaaaaaaaaaaaaaaaaaaaaaaaaagagtacatcaatatatgagaaacagatgagtctcactaacatagatggtgggatgtttatggaaggcatagtaggaaggcagtttggtaccagattctaggaaacctttttatctttgttaagtgttagaaatacttttcaataggtgatggcattggaagattttacatatatctgcaatatgaccagtccatgtttcataaaggcaattgttggaccatgtgaaacaccacttgaataagaccactcgagaagcagtttcaatggtccacatgaaagatgagggctagaactctcacaatggcagaggagatgggacatggactcaattactactttacaggtaaaattgatgagcttcagtgactacgtttgcttctgaacaagattagtggaggtgaagaatgggatgctaaggaattggcagttgaattactgaaaaggccatttgggttactaatggccattagtcgcaatagtgattatgagatgaacaaattgtggggttagaaacttgagtctagttggaagtattttgaatttaagttggaatattaggtattgttttaagttgcactctgtctctctccaaactatttcataaacattcttcaactgacttggtccatgaggaaacagaagttttctgtattaaaactagtatgaaaaatatgaatgtgattcttatgcaatggtagtgagttttaaaatttttgtcaaattgtatttttactgagtcttctctcactctttcatttcctacatgaatatatattattacaatttctaagaaaaatcatcaattaaaacattagctgttatacccagccagatgccagtttaatttaaatggttttgcactctcaaactagaattattgacttcagtattacttggtttgtatttcattacttaatttttgttctaatatttctttttttctaagaagtctgtaccaaattgtgttcccaacagaaaatttttaggaaaggagtttatcaattctagttaaagaaaagtaaatgaagagaataataattggtttcatttattaaaagctaatcaaatttccttcatattaggcattattaactcagtgggaaaaagtgcacttgttttctgtaatctatgtggtattttaccttcaggacactaacttttgacatattatgaaaacacaccagtagattagtattacttggaattctgcaaataggctttaattattcatttgtattgtaacatgaagaattcggtatacactcaaagatgattatttcagagtgatccaatgtccaaaaaatttccagtgatttgacattaggaacctcctgtgcctacggagagcaggctctgtgctaggcatcatggagagtaaaaagactaaaatccattatttttcgccttccaaataatttgtaagagatgttacatacaacatgagtaaattgaaaccatggtttggaaatcatagatttttattgtccctacaatttgaaaagggataatagtacttggtggccaaaactggttaagacaaattaagctcaagatcctgatagcttactcaataggaaaagcagaatcttcatccatgaatgtttgcctttagaggccagtgttatttcactatgttatattggaaaatagatatcaccttacagaaattctcatttactgtgtagaacaaatctagttttttttttttaaattttattgtaagcaagactatgtcttttcaatccaaatgaaattattggtagaaagattctttagtagtcttgataccatgtgagtaggaacgtcttaaattagaggagagtgcttagcaatatataaatattcttttctcaaatgcagaaaaagaacgattcctaaagtcacaatacctttggtatcaggtaaaatctctgcatctcagtcttgaagtaattaaatcgaggaaaataattctaccttgagttgttttggcccaatttcatgtttttcactaaatcaaccagttattcttttcctccaattctcaaactctttcacatagtggaatggtagcaagattacattttttatgagattgagaaagcccatgacagtgaaacttttgttttctgcggctattgctgtaagtaacagtaaaggactagaacaagctgtagtgtagaaatccctcaaacacgggagcaattgccaaaacaccccctctaggcacgctgtagcactccagaaattaatccgtgtaatgtcacctcagttccagtccttctcctctagtgttctaagtgggttagtaaagcttaaaagtaattggcaacaaaagcagctgaatgatagagcataatcctcatggactttgtaccgttatcacaaaaaattctctttggcagaatttataacggcactaatatcaggtatatgatgcatgcatctgttgatttttctcaaactctgtcttccaggcatataaaaatgagaataaacttaacatccctgaaaggcatattcatagtaaattactgcttggaaaatgcagttttcatgtttaattgcctcgttcccttctataaatacatagtatcttgccgtatgagaggaataaacggcaaggatgactgggcatttatgtagtacatggattcactaataagaaaaagaatatgatatttcaccacctacttaccttataataatagtttgagaattgattaaggtaatccaatacagtctctgataacggagaatgtttagaaacaaagtttttttggagaaataaaagttcagatcaaaatgagcattacccagtataataatcgtgttttaaatttagggttttttatgaatcttttaaagaaagtatccaaatagttgttttgttcaattctgtttcatcaaactcagaagggggaaggagtagggatctaatattggcattgttcctcctgctccttctcagtgggagtcaccatgttgacgatggtacagtggtatctgtattatctctctttcaattctcatgatcatcccctaagaaatatattttaatctccttttcagataataaatataaagttcaaataggctagatagcttgccaaatacatatagactgattgttgaaattaggtaatgcgtgaattcacccacgtctttttagtgattgagaatgtatgttacttgttgatctttattttcactatcaattatacataatgtgaaagacagggctaagtgtacactgccccccatttctgtagtttacgtgtagaagagaagatttctgctccactcatcaggagagaaaaatatgggtggcatactttcccatgctctctgacccctcattcatcatttccttctttgtccagagaaaattgggcagatgtttcagccaattctttatacttttaacaggtatgtcttcagaatagtaaaggagaaaaccttcttttaagtccagtgctttctggctttatttgaaacactgtttctacctaattcattgtacatattactattaggacattttatacaactaagagggccttaatgactttgaattagattaatcatttgatgaaccaataaacaaatagaaaaatggcattaatttggatacttgttactggctttcaaggttttaggagcacatttttcaaaatatatttagcttacttattcagtttatttttaaaccaaaagaattaaccattatcaatcccaaaagcatttgttcaaaagtgtgttggaaggggatttgagaggctgtaaataattttccatgttagagacaggaatgtgggctcagtggcaggctttcttttgttttttgtcaatatgttgtggtgctgtttggatataacctaaatacaactgcagaaaggcttattctatcataacagacctttgtgggttttagaattgtgatggcttgtttcctaaagcattttgattgattcatgtattgctttgcttttcaaatattacaccaacaatttttatgcaagaatcctttatccttgccaagaatggcttttataattttacaaatgttttccctctatgtacataatatttgatgtaaattttaataatataacatggtagtgatattgttgggagctgactgaagatctacaatattgcctttattgaatttacttaaagggattagtgacacacccaggacattttatatgaagattaagttatgaccagagaaggtattttagctgattgacagaagcacagcagacaattcctagaaatacagagaaattggcacaccaaagatacatactgagagttggcacaaagtagatacttaaaaaaaattcctgaatgaatgaatgaatccaaggctactttggttctgctttggccacaagtgctgtgttaacaggagaaagcaagcatgtctaacttgtatgcagagataataatcaaaggaaaaaaaatccctaatatctgataaaatctgcttccttagttgaaaccttttgatactactggtgatattcttatcaacaggtaatcacagttctgttaataatagacagaggataaaagtgaaatctgagaactcaggcattagccctaaatatgttgtttactgtggtgaaatccagggctaaaactgcagacttttatgctcttgatttcttgtctataaaataggcacaatatttattgctaaggcaccagagacttctcaggggcctaaaataaaatgtataagagaaaactttctttcaaaaaataataataatattattaaaactgacctggagttgccagatgactggtggttgttagcttgtctgaaaaataaattatattaaaataattattacctattttaaactaattaccaggaatttattgtatattcattctgtataataattaacctaagaattttaaaagttattacgcattattagtgtccatttagaagtatgtcatttgtatttggatttaaaaataaatcttttatgtttttgatgatttttagagttgtagcacagaggtttttagatttttaactcctcttttattttctaactaaagaagacaaggttattcaatgatcaataactaaatgcgaggattcattaatctcataatgaccatagacgtaaatgttccaggttaatttgatgttatatgaaagagaagcgtgggatatgcttagaccatgggctttggaatcaggaggaattgcttttgatttctgagtttgacacttagtacctgtgtgaccctgggcatgttacttattatttaatttattctttcaaatagaaaagtattacgacctctctacaaaatcattctgataattgaaataggtcatgtttgtaaaatatagtacctggctaaagaggatgccttaaaaaataagacttcaagtcttataaaaattgtcatgattactataccaaaagtaatatcttcatagtttcataattatgaagtttgaaattgtagcttgaaagatgggatgaagaaaatgctggaatagagtagttaacataaagtctgaattctcctttccaaagtgaaatatattctgaaagtggtctttctttatctcacccttagtgacctcccaagtgccatagcttcatcaccaaggcaccatgatttggagccgtttatggagatgtcacacacacacacacacacacacacacacacacacacactcatatatctctcatatgtaacacacacactcatatatctctcatatgtaacacacacacactcatatatctctcatatatatttgtatataaagtttaaaatatgaaaggaacattgaaattggaaatgtatatccttggcataagtgatgaggcattaggaacattgtaatattacgaattatgttattcctaaccaatataagcttcttacaacttgatatgaagactgaatgcctcagaaatagctgcaagaaaaaaatgtatattttcctaggtgatagagtttgatgatcactaagttgtatttttaaaagtgccataaacactgacctgaagttgttgcagggcttactgtagaaaaattctccaaagatgctggaataacgtaaagttgatttaacacatgagtttatgatataaatacattacaaaacattgagtacaccttgaatattcattcaaagggcatctgatcctttggagttcctattttatcctctgccatgctaagccttcctattcattatttggttgtaatacatttgataaatttccagagtctgcatattctctctatgcagtttacttatgcaaaaagtttgctttattttatatctatttaagaaagatatccgtttattaatcatagttctatagaataatttacatttgagccaactaatataacatgatacgccacatcttggcatacctagaaccacttgttttacactaaaacatatgaaggtaacaattgcaaaacaatctttcacataatgaatatttccttggaactaagtggtatataagtaaaaagtgctttgcacatagaagacaaaagctggcaattttcttcaaactttaacatgtttgatagttttaaaaggatagactcacctatgcaagatataaaggaaatcaaagcatatctcatgaaaagtcatgtggtgaatttgtttttattcaagactatattgatgataagtgggctaagaagtatattcgtttctactaactaggtggtttatttcagcatttcatcatttttgaattgtgttggttctataaaacctattgaagttttgtaaatgatacatggtagagtgttgacactgaagataaaataaaatttatgtgacttttcataaataatatggttaaattttttatgtttgacagtgtattatacacaacttcaagatatctatgtaattcttaactaaatttaaaactataaatttgaaaattcacatgatacaaatggatattaaactgaaatacctacaattaacttggtaccgtgtttataaatgtgttttaacacaattcaacaagttaaatgtaacttctacttgttgagaatattcttgggctgatgttgtaaaacagtttattacatttgtgatactaattctaaattaactcaaaggatatggtttcattgaataaacatttaattttaaaaatcacaaactctcttcccccagatgatccaaatataggaaatcgtgaaaaaaagtttcagcatatctgtcaatttgcttgccagaacagaccatcagaaaccaatgcacattcaaatagagatagtaagatgacaactttggggcctgttggaggatgggcggtgggaggaggcagagaatgaggagaaataactaacaggtgctaggcttaataactgggtgataaaataatctatacaacaaactcccatgacacaagtttacctatataacaaacctgtatatgtaccctgaaaagttaaaaaataaaaaatgaaaatattcatttttccatgccaaaaaagaaaaatgactatgaaaaaaatcaactaaaattgttcaaagataaaaacattacaaacaaactagtataaaggttaagagggcagacattaggatcagaccacagaggtcagaatgcctaagtctaaatgactgtgtgaaaaaggccatttaccaaaagtatctgtgttttggtcttctccctgattgggggatagtaatgacatcacataagaggattaatgtagagagtaaaaatgttgatagataaaccacctgttctagctaataatagccagtagtagttttcagctcatctgaatcaaagatttaaaatagacagtctctgctcaaacagctgtgacatgcgtccaaaccatcagtagaggaaggactaagaatttatcttcttgctgaacagcagctgcaacatgttgcaggagactcaatcaaagaggaaactatgcttgatgaaacaatgctctgaagagaagcaactagagatctacaatctcatatctactattagaaaataaacaaagaaaactcctggatgtttttatgtatttgatttagaggcaaacataccgattgatctcattttgtagcaaaaattagttgaactaattaaatagttaggctatttagagtttctctttattcccctcggtgtagatatttatgtattggctaactttctaacatccaaaaatttctgaattccaaaatgtatttggtcccaaggtttatgggtaagggattgaatctggatgaccttggcaaattactactgttctcaacaatactcaataaggacactgtgtttgttgaattgaattgaatgaaggataattagaatggaaaatttggaacaatctaagcatttacaatcgtattttttattatttttgatgttccatatttcttcttttttggtttattcttatgttaaaattatttatcattttaaaaattaatacttaatttttataaataggtaactggaagggatcaaactcattgactctacttttttcttctttttttagctcctcaattagaaatcggaccttgccactggattttacaatctaacaatgtctagagagagttcctgaagtcagggtgtgcttgaacggtgcaaagaatgcgtaagacccacaaacttctgtgcatgccaacactctcagaatctccttggaatgcataagacccacaaacttctgtgcatgccaacactctcagaatctccttggaatgcataagacccacaaacttctgtgcatgccaacactctcagaatctccttggaatgcataagacccacaaacttctgtgcatgccaacactctcagaatctccttggaatgcataatacccacaaacttctgtgcatgccaacactctcagaatctccttgatatttggtattttataaactttttctcattgataagtttcttcaaatgcggtttcttcagatttcacttttctcatgtaaatgtgtcacctcaggcaataagacatgttcctaaggtcaagcatgattccacttcctccctggtatattgctagaattttaatttcatagcttaatgattcaaagaaatcaaataatgttcacacatacctaggatatcaacgctgttcaaatcaatatggaaagtgaccagttggctggatttatttgcttcaaggccttgaatcagttcttcttttacattttcatctgacacccactgggcaaagaaaaggtcaaatacgactataatgctgccatttctgcaaagcaaaagaggatataagaggaaaaagtcagccatcttccactgatttgtgttcaattcatgttaaatgtctttgaaattctctatagttatcatcttgctaattctcattatacctgtgtaaggtagtcacttcaaatcttatctttatttcatgagggaaagaaaaagtgaattgaaagactaaatgcttttttgagaagagaaactccaaagtagatgcaaaattgaaatctgagttttctgagttccacgttcaagtactcatccccaggccaggatgttcctgagacccttgtgttaaaatcacgtggtctctttgcacttactctgattttactgtttggagaaaagaagggtatggatttgtagtttttcatggataatttctaagttgggggaaatctaaggtagtttcactggtttcaaagaaaatttttctacatagttttaaaaggcctgatagcaagcttatggcaactaatctatatctccctcttcttctctattttgcttaatataaaatatcaaaatatgccctgatttcaagggatagaaagaaaacaagggtatctgggtctattagggattcacaagaaattcaatctcaggtccatgagtcgggattgtcttgcctgcatgatctccaaacatagcattagagttcagccatatagccctaatcatcttcccccttgattttatcccctgctctgtaccatgcattttaaaaggtaactttttttcagtgtaaagaaagagaaaaatgaataaatttttggtgaatagggatacttgggagatttttgccctcctgcttacatttctatttgccatatgctatcattttagggtatgaccacttgggagacaaactatagctctgatatttattctatacccctcaataaactctaggcactcacggtatacttggctgcttaagacacagactagggcaaactaaattttgcatgatatgtttgctggttttgaattatgggagttatatattcttgtgatatatgtaagtttatgagcttgttgaaggattttctcaagtccagtagaattctttatttatctctccatctatctatcttgatagaacctacagtaaatgttattttttcttccatgactggatatagaactagaatattcctgaaagatcacagtagatcagcatctccactagggggagtatattccttcttcgtgtccatggcactattcagtttcacagtaattcatttccaggaagctggtctttcatttttaaaatgaacaagatgatataatatttttgatataatatttttataattcacatgtattaaataaattatataaaatgatagaaggtttaactttctaatcatttgcttaaattatagtagccaaatcttgtaaatgagaaggttccctagtaactgtttagttcagggtttcccaaacttacccatacatgaaatcactgttgtccttggtaatgatacatttcgtcacagacactacctttcatctacttttccacacttgtgctggctggctaacccctaattttactggagaataagcctccattttttttaggaaaggtggcatcttctttaaccattctttataccaaacatggttttattcgtgggtgtattacctggccttggtcaacagaatctgaagggaagactaatggaaacttctggaaaacttttttatatctaataaaagaacagctcacagtagattaccacccttcgttgttgaacattattaggtctacataatttgctgaaactgccacatctaccttgagaccatgagtgaggccatggttgataagccaaagatagcgtagcagaagaaggaaagtacccaaagccctgactatgtcattgtcattgtactactgaattaacttcctttaaaacctctagatttcttgtgatgtcagataataaacactttttttttttgagatggagtctctctctggggccaggctggagtgcagcggcacgatctccgctcactgcaaccttcgcctcccgggttcaagcaattctcctgccttagcctcctgagtagctgggactacaggtgcccgacaccatgcccacctaattttttgtatttttaatagagatggggtttcaccatgttggccaggatggtctcgatctcctgacctcatgatcctcctgccttggcctcccaaagtgctgggattacaggcatgagccaccatgcctggccaataaacacttatttttaaggcacttttagtcatgcattctgttaatgggaattttgaaaattctaacaagcatacaactgtcagcccctattccatgtttatatgaacagaaggtaattactctatttttgaagctgaatattggccaatattttcattttagcaatgaggacactgaggcttagagtaatgtaggtaactttgcctagggttatacagcttattagtgtcagagatagaaaagaaacctagggaatctgtttccctaatgtgtttttatataattcccatccccccacactcaacaacacttttatcaattctattctgaactatttatcagcaggaaagaggctacagcacatttaccctaaaggcatgtccaggtattttattctgttgcatagttagcagaattttatatacaaatagatgaaaaaaacagctggttggatatttttggggagaagggaaagatatttatttctgcaatacttccaaaagatagagcactgccttttttcctcctcctcttcttccttcttcttttcctcctactcctttttcttttttacattatgtcttcctaatcaacctcactttccaagatagttaaatggacaggattgattgtggttaaaatgaagtgagagtgaacaatattaattattttctctctctccaatcccccatcttcattttatctttggttgcagaccagaaaacttaaattctgattaaatctgttttatttctatgtaatttcaccggttcaatttgactgaacacttgctttcattttatttgagttacggagtaaaagaggtaaggtattttgggcaaagaaaatacaaatctggaattttgcttcactgagttgaaagtaactggattagttcatcctcaggcataaaacatttttctttgaaaggtgtgttctcttagttgtgaattatgcattacatttaataatttatactttgcaaggataggagttgcatatcctatatccacataaagttgtagcctttaaaatttattttcttatttagtggaaatgttgagatgagagagataaagcagaaataaaaaaagttgtaataatcatttgtgattcacctcataagaaagctgaagctgtttagttgtttagtaatgaaatgagaattcttcctttaggttaaaaaaaatgaccattttcatttcaaagtactagtccttgtaaaataacagtttttctctaaggcagagaaatcctactatggtacagaaagcttgagtataatagagcaaaatattagttatctcatatattccttaatgatattggtaacctttagggctgctgagtaaacaagtctttcctttcctaactttgtggcttatctgtgctcaaagggcaaaagaaactgcatgttgccacaaagggtaaatagttctttattaaaataatcaaatgctaaatgttctggtgaaagcactttccacaaagcagaatgaatgaaagtattccccaaatagaccaaaccattggcttaccctgaagagtagctacacacacacacacatacacacacacacacacacacacacacacacacacacacgcacacacaccccaaaatcatacaagttagtaagtggcagagattggcattaaatattgtgaaagtaagagaaaatagttcaatgactaaatctagtattggagtgctagaatttgatcatatacacatacatggtgtgagtttaattaaaatctataacaaaaatgtaaataggtattttaaaggatttatagatatacagttgacgtaggtactgttaggtgagaactcagttatttctgtttctgattttatcaattggatttttaaattaaaataatttataaagttaataatgagtcttctactgtttcctatgagtggaatacgtatatttgtaggtgattatttaaggtaaagtaatcctaagtgtttcattgttactctctctcctgctcctgatttcctttttctatcctcctcttctaggtctcccaaaagagcaacaatgtgatttatctaacagacgtttttatgaaattcctttgcattgcacttttcaaaaactcacttctgatttaatggcagctcagctaccaccagagggaagtatctctacactgatgaagtacattatttgacagtcattataaaatatttgtcaaggtctgggcacggtactggcctcctaggtagctataaaggaggggaaacaaacaatccctaagctcaaataatttacagtttcatatgtggtgattttgtcatctagagaaataaaagattacttactaaatatcagaaaaatttgggattttggtagcccaccaggcctatatataaaagtctatattcatcaaattttcccaacctaatgtaagtgaagttatccagcatgttgtagacatgtaaacataaagggttccattagcaaaactattctgataaactctgcaatggacactgtgctttctgtatggatttcactaggcaaagcccaattcaagagaggcaggcacctagaatacctctccttaaaggaggttaaagccttttggaaataaatctgaattgatgctttactgcagctctccagactcaatcctctacaaaactagaaaagagaaattcgtttcattcaccacaacgtagacaaatagcttaaagtgaaccaacaaaaaataaaactttcccgtgtaatgttacactcacaaaataaagactaagtacgcatttttattagcattttgaaaaagttaaaataattaacctttcctgcatgtctgtgtttctccttttagttctgatattggaccaatgaaagaggctaagagattatacactctggaaacagagggaagggactatgtactgtaggtaggaaggaagacagcagatgggtgtaggggcagctcctgggattaagatgtcagaaatatgcaatagagtaaagaatgatatgatagataaggaaataaagaaaataaagacaagagaaagaaagaaagaagaaaaaaagagaaagagaaagaaagaaagatggaaggaaggaaagaaagacaagagaaagaaaagaaaaagaaagaaaggaaagaaggaaggaaggaaagaaagaaaagaaaaaaagaaaggagggagggaggcagggagggaaggaagaagtaaattaaggaaggaaggaaggaagggaggaagattaaacctttttgcataaaaagataaagctttcattgtgtctgtatttgataagattaaaaattcacctctgatttaatagtagcacagctaccaccaggggaaaccatctctacactgatgaagtatattatttgagaatcattataaaatatttatcaaggtttgagcactgtactggcctccttggtagttataaagaggggaaagaaataattcctaaactcaaataatttacaattttaaatatagtgaatttgccacttagagaaataaaagattatttactaaatatcaaagaaaaattctgcgattttcatagcctaccaggcctatatataaaagtctatgttcatcaggttttgttccaacaggagatgggaaggcactgaggtttcttttgaccattaaataagcttcatttgaccttctgccattgtttttctaagcataatctcttttacctttgatttgactttcctacctctttttggtcactaaaactaaggattctgttactgatgtcagaacttttgtgatgatccgataccaattattttgtccttaggatctttgattcagttgttccttacctgagatgtgagactaacctttctataaagtcaggctcactgtgtatctccaatgtcctaccagtcccctatgactttaatttggcacgagttcattgtcacactcttaggtttatatttagcacattcatgatgtctcaacatcttcttagtagccctcaatgccagctctattatatcctcaacatgctacgttattttttatctttatccgaaatggctttccttgtcttctccactcaagtagtccctatctatgcctttcagacactgtcccacatttttcataaaactttccatgacccaccctttcaagtcaagggactccttcacacagtaacatgcctgtgcttttggagaactatttaagaattctcaagttagtttatttcttgtaacaaaaagttaaagccatggtaactgtataattatttttatagccataggatgaagattaaatgaaaagatgctaatctctaacataatattaataggatgaagattaaatgaaaaaatgataacctctaacataatattcattatgttaataacagctgctaaataatttttcattcatttgctaagactttatagaatacatatgctgtggtgggcattagttaggttctgaaaatacaggtatcaaagatacattctctgccctaagagagctcctagcctagtaaggagatagacaaatcaacaattatgctatagtgtgagaattgtactttaaatgtagatacatggtgctaaatgcacagggggaagaagtacctaaaccagactagagtgtcagttaagtgtcccagggaaggcgacatggactggttcttaatgggttgtgaggatggaatataagaaaggatgcaataataaggagagaaaatgagagtgccagtatattaatccatttttacactactataaagaaatacctgagactgggtaatttataaaataaagaagtttaattggcttacagttccacatggctggggaggcctcagaaacttacaatcaggttggaagcctaaggggaagcaaggaccttcttcacgtggtggcagaagagagaagagtgtgaagggggaagaagcccttatgaaaccatcagatctcataagaactcacacactgtcatgagaacagcatgtgggaaactgccttcatgacccaatcacctcacaccaggtacctctctcaacatgtagggattacaattggagatgagatttgtgtggggacacagagccaaaccatatcattctgcttcaggcccctcccaaatctcatgccctcacatttcagaacacaatcatgccttcccaacagtccctcaaagttttaactcatttcagcattaattcaaaagtccaaagtccaaagtctcatctgagactagacaaggctcttctgcctatgagtatgtaaaatcaaaaacaagttcattacttccaagatacaaaggggttacaagcactgaataaatgctaccattccaaatggaaaaaaatttggacaaaacaaaggggctacaggccccatgcaactccaaaatccagcagggcagtcattaaatcttaaagctccaaaataatctcctttgactccatgtctcacatccacggcatgctaatgcaaggggtgggctctgacggtcttgggcagctccaccctagtggctttgaagcatacagctcccctacccccactggctgctttcacagctggcattgagtgtctgcagtttttccaggcacacggtgtgagatgtcagtggatctaccattctgtggtctggaggacggtggctgtcttctccagagtcagcccaggggggactctgtgtgggggctctagccacacattttccttctgcactgctctagcagaagttctccatgagagttctgcccctgcagcagacttctgcctacatatccagatgtttccatacatcctctgaaatctaggcagaggttcccaaactttaattcttgacttctgtgtacctgcgggcccacgtggaagttgccaaagtgtagagcttgcaccctcttaagcaatggcctgacctgtacactgggcccttttagccatggctggagctggagtggctgggacgcagggcaccaagccccaaggctgtacacagcagtggggtcctgggccccatccacaaaccatttttcctcctaggcctccaggcctgtgatgggaggtcctgctatgaagaactctgacatgccacggagacatgttcaccattgtcttggcgaataacatttgactcctcattacttatgcaaatttctgtagctggcttcaatttgtccccaggaaatgggtttttctttctgccacatagttagcctgcaaattttccaaacttttatactctgtcacctgttgaaaattttgctgtttagaaatttctcctgccagataccttaaatcatcactctcaagttcaaaattccacagatctctagggcaggggcaaaatgctgccaatctctttgttaaaggatagtaagaataacctttggtcccttttccaataagttcctgatctccatctgagatcacctcaacctggacttcatcgtccatatcactcttagcattttggtcaaatccattcaacaagtctctgagaagactccttcccgtcttcttctgagttctccaaactactccaacctctgcctgttacccagttccaatgtcacttccacattttcggttatctttatggcagtaccccattcctggtgccaattagtcttttttcacactgctataaagatactactcaaaactgggtaatttataaaggaaggaagtttaattgactcacagttctgcatgactggggaggcctcaggaaacttaaaatcatggcagaaggtgaagaagcagcaagtactttcttcacaaggtggcaggaaagagagagagtgggggaaactgccacttataaaaccatcagatctcatgagaactcatccactatcataagaacagcatgggagaaactgcccccattccaatcacctcccaccaggtccctccctcaacatgtcgggattacaacttgagatgagatttgagtggggacacagagccatatcacccagtaacgaaaacatagataaaagagagaaagcaggatggttttgagggtgtacagatgatgtggcaggactgaggcagaacgctgtgtcgagttggggaggagaaacagaaggccagagtgtgttttggtgacagagccatgcagtacacctgcatttagtatgatagcactagaaaaagtctttaggtatttaaggagtgagatatgaagatggagagacatttattctctaaaaaactagtaactacaagcaggatcagtggatgaaaatcaaagaaagaaataatttggtgataataataaagcatgttctagtacctaaagttataaataataaacaaaatatactaataatcatgattatttaataggctgtttgtaggatgtccacagcaatattgaaaaaagattcctaatttttgttagtcacattacatgagaaaattaaatttaagcagtatgaatctctttcttttgttggactagaatgaattttctttagtctgtgagcattccagctcaaagcagtcaagcaaaggctagactacacaagaaaagaaaaaaatttttcttgcactatcacacaaactgtatatacaacctgacatgtaatgcctaataacgttagtaaaaatttcttgactctgtcatatctccccaacaatattttaaattcctcacagcagagattttataccttaatcatcacataaattactcatgcctaatttattattaatgtctgttataaattagtcacttaacccaaaggtgccctttgtaagtaggcaattaaaaaccaaatagcctatcaaaacagagagagagaaaaccagttctaaatataccaatacaaattaaaatgtcttaatgatagtggttgaatgagctctttaataaaagactttctcttaatatctgtattctcagaacctagttaaatgtctgtttctaagtaagccctatatgtgtgttaagtacataagcgagcaaatgaatggatgactacctgaacatttatttaactctatgttgacaggataaaaatatttgcttcagttttccagtatctctttaatatatgttttgcctattttttgaagtactctttttagtgattctaccctccccttgtgcaaagcacagaacaatattttatattttcatctttatctttattctactatagggggattttaagttagcaatttatgttgtatttcaaagcatgctgtatctctcatagaattttagggatattaaccctgaataaactgaagattattttgggaagataaggaaaattctgctttctaaagattacagaaactacaaggtaacttagtttctatcatatcacatttgaagaactgattttaaaagcctcagatgaaacaaaaaaaatgtgtcatttttcaggaggaggtaaagaaaaagtaaataatgataattttcattctaaccaaacagatgtttaaatcttcatgtatggcattctctctctctctctctgtctctctctctctctctctgtctctctctctttctctcacatacacacaaacacacacttacttttgatacttttgatgtatccatgaaccatataaactgtacagagatactgtagactctacctcattttcagcttgcctccagtttttactaaaacaacaatgaggtcattatgaaaaaaaaacacattcctactaaattataacagtattacaatctaaatgataaaaaagccccttatagacttctggatagatcagtacacctttaaatccagtgacggattcttataaaggctatttctccactcgtttaactcattccactctgactttctgagtatttttctatatgctaactccagcaactagcattgtcaattcatagaagagtaacacatgcataaccattaaaaaggaaaaaaataagagaataaaaagattgtaaacttaggtactgtttaccctagtctgagtatagattatcccatcagttttcccataaagttaacgaacactttaacctacacaactttaaaaatcagagtggagaacaaggaaaactaaaggtggaagcacagggcttgcgtggaaaaaggtctatggccatttagcaaatgaacaaaataaggcacccagagggagagtagccactgagaaacatacagcaaacactgcttggacaattcctgaatatgtgactctttagccttaactttcattgcttcactctgtcttgagtacttttttaatataaaaattagtagtagaggacagcatgaatgttttagacagacagactaatggcagcttgacattggaaaagtaacctagcctctctgaaccacacattaataattcacgacagactgataatctaaaacttcacaaacccctagtgaggaaagcattaggtgacatacacaagtacatggtagtaatggtacacagaagaacaaattgacaagcttgtggtgatcttctgattagtactgagtatttagtttgctaaatgaattggtacaccaggaacaccatcagtccatatatacttgccatttttctttttaaaaacagggctaaagtatcttaaccttttcaaaaataatgtaatttttagggagcaaaatgtaaaacatctgaatttttttagtgttattatgatgccttattatttatctaattgaagacataaaccttaaatatcaatggacaatgtagacaagaaaactgtaataatttctatcagactgtcagctgcacaaaagcacaaaaaatatgtaattttaaggccctggaatataataaataatacatgaataaaagtaaaattaatattcaggttttataggtcgcagtgtcttgaaaacccatagggaggctgttgtcctctgctattgagcttgtacattgtgctttcatttcaaattgtgggcttggagctttcagctaccttcaactgcagtgcagcagctgcttaaaaactaagacttacttactctcacggtaaaggagtatggaagatggccagctgtaactaaagaatattgccatcagtctagcttacttagatgtttttctccatgctcatcttggctttcattgttctccttcctgttccagatttactgtcatccttcttatttctgtagaaaaagagaagtttccttttccattgcatcttgagcccacccatctatggtgaaaagcaaacccaccctccctagaagttgttatattctgtgggctctgctactctaacattctcatatgaaaggagagcacatgctgaatcagaacaacaaaactccattcaaacacattccccaacacctactagctgtgtgatttgaggcaagttatttttccaagcctcggtgtcgtagttatttaaggcggaataattgcatctccctcacagtcatttggtgaggagtgaataagaaaatacatcttacagctgggcgctgtggctcatgcctgtaatcccagcactttgggaggccgaggtgggcggatcacgaggtcaggagatcgagacgatcttggctaacatggtgaaacagcatctctactaaaaatacaaaaaattagccgggtatggtggcgggcacctgtagtctcagctactcgggaggctgaggcaggagaatggcgtgaacctgggaggtggagcttgcagtgagctgagatcacgccagtgcactccagcctgggcgacagaatgagactctgtctcaaaaaaaaaaaaaaaaaaatctgtctgtctgtctgtctatctatctatctatctatctatctatctatctatctatcttaagtcacaaaaggcttggcctgaaatagagattcaaccagtgagtttcctttttgccagcttgtcataggatctctgttttacctaaccttctggaatattgtctttctttctgtgctttttaaatgtgaattattgtgaaggctttgctctcttccctttttcagctaccccaggtcttgatcagtctttaacttttttttcttggaatcctctccctttgtctttttcatttttaacttaattttataaatttacatttttctttcttttatattacatgtatttttaactttccagttgacttgtatctctattccaaaagccctttggtagtttgtagtttagaaaactttaggttcagagagatgtcagcaagattgtcaaactctccttcatgatacaacagcaacaacaacacacaggtcaattttttttgtgacaaatacaaaagctaattgtttagaaaatagatcttacaatagaaataagaaaatagttcttacaaaatttccataatttccatatgttacagattcaaacattcatagtgtggaattacatcattacattattaatctaagattcgttagtttattgagcacctactttactttaagcaatcttatgccctctgggtacacagtggacaagtaccttctctctaggtatttatagtataaatgaagcagggtgatacaatattattttattaaatgacaagcaagctttttccaaatgttcgtagcaagtcaaatactatatctgcatctgtaccctctccatgtgtctctgcaagattttattgtcagtagagagaaacatattaacataagatcaattatcaaaagttattattattcgctactaaaatgaaagtttatgctgtgccactttgcttaatcctcaaaaaatgttgaaaaatttaaatattcctcttttcctatatatagtgatgctattttacaaatattagcaaaaaaatcactaattttccatcagtagaaaatttttgagctatactcactcaaattgtaaaactcttgagttcttatattcattcttcagattgcttgatagaaagatctcatctatctagaaaaatataaaagattgaatgagtatactaaatttaggattttaacttttgttgaaaaatttatacaaagcaatctttatgttctgcttagagttggggcaattttctccatagtaatggggctcatacatttgagtatcttgggcatattacatttattctctagttgtttcacagtgagaaaatggtgttttcagcaagtagttaaactgtgttataaaatttgaaaccagctgtcagtctcctaccatttgctgaaggtcaaaagcaagaactttgaaatccactgagagtttgtcttgcaaattaggattatatgtaactccggatgttattttaaatgtcgctctggcttcatgactctgtccaagtgctgcacctagataaattaataaggaaaaaacactaagattttggattatgagtaggagaaaatatgcacattctgttaagacatagaagtaaagctctcgcctgatgtgttagctctgtagttcttgctttttctttgtagtctcatgtttcaaaatcagctgctttctttcaccagctgtctgattgttttaaaagattggaaactaaaccttttctccattctttcaacattttttttcttttctttgaagtctaacccacactccaagcttccaaattttcattattattgttattgagattcctgttggaagatacacggactgatgaactcccaccaatcatgggaagtgactcagggaaacatggtgagaagtgaaccattaaaagttttgtagttgctttcagatacttcttgaacacctagcatccagggacaccactgggttttgacatatgaattcctgtgaagatttcagtgttttggttactttgaaacatgactttgaggctacttctttcattctaataattataaaaatggcatgcatgaccttgtgccattagctggtgactgtctttgttgaagacgttatttagaatgctgtagaaaatagataacctcactaggaaaaaaaaatgtaaaaaaagaaggttaacgaattaaatataaacatggataataaaatgtgtcattaagtcctacataatccctttatcagcatattttcattgacactgatttatgtttaaaatgaattgcttcaactgaaactcacaataatgaactcattagtaaatataataataatgacatataattctcacaataatctggtgcgagaagacgtagtttcttcttttctgagatagggtaattggagtttagaacgattaagaaaatttctcaaggtagtaaaggtcttaggcaacagatctggaatttggtcattgaaatgactgactctacaacccaggatctctatataatacattgacaccaaactatcccattaagaggataattagaaataataattcaggcagtatgtgtgcatatagtctaaatagctttaattgcataattgatgtaacatattatttatactatttcatttgtattttaaatactcaaaattacattgaagtttgcatgtttaaatgtagaatacaaagaaggactgaggaactacaacagattaaaggagactaaggaagcgtaataactaaatcttatataggaatctgcattggatcttaagctggtaaagggcattagtggaaaaactggtgaaatttgaataaagtatgtggttcagttaacaatactgtagaaatgttaattttttgattgtgacaattgtactgtggataaacgaaatattaacatccaaggaagctgggttatatgagaactctgtacaatttttgcaacttttaataagtctaaagtgaagtcaaaaaaagtataaaaaatgttaaaagtagtatgtgctttgaaagccctaaagactctgcaaaaaggctcctgaaactgataaatgacttcagcaaagtttcaggatacaaaataaatgtacaatgtcagttgcatttctatacgctaaatacattcaagctgagagccaaatcaagaatttaatcccattgtcaatagccatacaaaagataaaatacttaggaatatctctcaccaaggatataaaagagacctacaaggataactacaaaacactgctataaaaatcagataacacaaacaaatggaaataattccatgctaatggattggaagaatcaatgttgttaaaatgaccatactgcccaaagcaacctacagattcaatgctattcctattaaactatcaaactcatttttcataaaatcataaaaaatgattcaaaaattcatatggaactaggaaagagccagaatagtcaaagcaatcctaagctaaaagaacaaagtcagaggcatcacattacgcaacttcatgctatactataaagctatagtaactaaaacagcatggtagtagtacaaatacagatacatagtccaatgaaacagaatagagaacccacagtaaagtaaagctacacatctacagccatctaatctttaacaaagttgacagaaaataaacaatgaggaaaggacttgctagttaataaacagtgctggtatatctggctagccatatgcagaagaatgaaactggatccctacctttcaccatatacaaaaattaacgcaagataaattaaagatttaaattaagacctcaaactataacaatcctagaggaaaaaaggaaaacatcattctggaaattatgcttggcagagaatttaggactaaatcctcaaaagcagttgcaacgaaaccaaaaattggcaagtggggcctaattaaactaaagatcttctgcactgcaaaataaactatcaagaaagtcaacatacaacctatggaatgggaggaaatacttgcaaacgatgcatctgacaaggtctaatatcccgaatctataaggatcttaaataattgcacaaacaaaaaacaaataaacccattaaaaactgggcaaaaaacatgaacaagcacttgtcaaaaaaagacatacaagtggctaacaaatattttaaaaaatactcatcaccactaatcaccagagaaatgtaaatcaaaaccacaatgagataccatctcatgctggtcggaatggctattaccaaagaatcgaaaaacaacagatgttgacaaggctgcagagaaacaggaatacttatacaccgttgatagaaatgtaaattagttcagccactgtgcaaagcagtttggctatttctcaaagaacctaaaacagaaataccatttgacccagcaatcccattactgggtatatatcaaaaagaaaataagtcattctaccaaacagacacacgcactcacatgttcatcacagcacagtttacaatagcaaagttatggactcaacctaggtgcccatcaacggtgtactggataaagaaaatgtggtacatatgcattgtggaataagatgcagccataaaaaagaatgaactcatgtcctttgcagcaacatggatgcagctagaggccattatactaagcaaattaatgcaggaacagaaaaaacaaataccacatgttctcaagcataagtgggagctaaacagcaggcactcgtggacataaagatggcaacaatagacactggggactaccagaaggggaaagtgggagaggggcaagggttgacaaactaacttctgggtactatgctcagtacctgggtgatgggatcattcataccccaaacctcaatatatgcaatatacccaggtaacaagcctgcacatgtgccccctgaatctaaaataatagtttaaaaagaaaaaaatagcagtatgcattatgatctctgatgtattggtaaagcattaactcgaatccctttttatatttagctgttcactgttaaacagtattatcacttataaatatttattttctctttcacttgtaaaataactaacctttgtatgtttattgaacaacagggattccaatggactttcaaatgcttatagatccttcaagttattcacagcaattaaataagaccaaaacagccatttttctaaaagtttaattcaatctgtattgtattttagtactttgtataattttataaaatatccacactttctttccctttaaaatatagcccgtgtgtatgtctatagtttttaaatagaccaggaattatactaaaattatttaataaaactatggcatgtgcattacattctaatttaaacttacttatttactagaataaaatagctaacccaacaattgtgaatttaataggtaaaactaaaatcactcacaatggaaagatacggtggctcatgcctgtaatcccagcatttggggaggccgaggtgggcagatacgaggtcaagagactgagaccatcctggccaacatggtgaaaccccaccgctactaaaaatacaaaaattagctgggcgtgatggcgcgcacctgtagtcccagctactagcaaggctgaggcaggagaatcacttgaacccaggaggtggaggttgcagtgagccgagatcgtgccactgcactccagcctggcgacagagcgagactctatctcaaaaaaaaaaaaaaaaaagagagaatttatatgcacatatatatatataaagttcatcattttaaaaatgtaaaaaattgtttttaagagaaaataaactgttaatacgtaggttattgctatgctttcaattttttaaatttaccctataaatgaataagtggtaagatggactataagttccagagcgggattgtctagtttggaatcttacttctgctacccactaataatgtgaacttaagcaagttacttctagtctctgtctcagatccctcatctgtaaaacgagcataccaataagctttcatatgttgtagctacacaatacatttgaaggtattttaaaagctgttggtacaaagttagctctaactaagagttatcatttcttatgctttttctgtttatcggagttgctactcagtttgtgacctttttaagtctacatttatatccaagttattttatattagtagaattaaaatggttagactgataagagaatgaagatagaaataaacaatattttctgttaactttgcatgtttatctacttacatattcaacaacatgttaatatgtttgtgatttaaattatatcaaaacaaaatcaggggccatgaaatctacttgattatatgttgaaaccaagatacttatttaacattatttattttaaaaactactcagtctcatgcttaaattctgcattaagtttcaaattacataccaattaattttcctaatattctctgaagggaactacagagaagtacatgaaggcaacataaatattttgtcatgaagattaatttgaaatattagattgaaagcccaaaataatgcatttagttggcaatgaataaaatagacttacagaataactgacactaaagtgtgtacattcagctgagagcaccttcacgagccaactccatgtgacttacctcgttgggattccttgattgtcaggcaggatactgcaattaatccagcacagagcactaccaatatggcaaagagagctgcaaacatgatttcataggagctgagagaatgatgcctagaagatatgcctcttttcgaccccatttttggttttgaaggcttgctaatttaagaactgaaagagaatataaataattctaccaactgaagagaaaaatctctcaaatttttaaagatgtgtaaagcaacaaccacctgtctacatgcataccagtcagtgtaagtgagttgtgtatgtctctttggcaaaattatgtctctatacattaagtatcattaaaagggtagttaatctttaagaagatataaatgagtaaagatgcctagagttgtaaatgttaactacctgaacaggccatttgccaaggtgaatcaaattaaattcatgttgtaaacaaaagacattttatcattttgagaactattaagaaaaatgtgaaattcatgacagacaaattagtcactaggcacatgcatctgatattcatagagagagttcctaacagatcaaccttctaccctctgactcagatgattcttaagacacttctcttatatgttgatatagaccttctaaaaataacttttaggtgcagatgtatataaagcctaacatatatatactctctctgtgtacatatacatatacatgtattccttatggaaacaatcaaaagtgttgcaaactttgttatgtcacccaggtgaagttatgcaatgtaaggcagtattacataagggaaagtacacttaaacaaggcgttctatggctactctttatggccttgtgcagttattaatgaatggtagtacctgtcataagaggaataaaatatgtgtttctattctaagaaaatagtctgggtggggaagacattgctcacttgccctggactttatctctttaaatatgccaattagaacaagagaacaggttaagataatcatagttatagttgtagatatatgctttatggaaaaatcaaagtcattttctgataattaaattacggtttagcattgggattattcacaccatgaataatgatgagttcaggaactttaaaacacaaaaattaaaactaaataaaaccgaatctattctgaagtaaaccaatgtgacttttattctggtaaataaaactggcaggaggtaagaaagttttagattggaaacccctaacacactgaaattgtggcatattataatgggctaagatgaacagtagctgcttttcttcttctttacccatgaaagaagagaattgcctgttgcccccaaactcaagaatttttgctgataaaaatagaattatgagtaaacaaatgtatttcattgaaaatatttatatttttagctaattgacttaaatatatatatgaaatatatatatgaaatcagagacaccacttatggacttgggagaagtttattttatttatattctaggggacaattacaataggccagaccctctgataaaattggaacctacaaaaagcgcctcttgaatttggaaagccaaagtgaaagcacaatgactgttttctttgtatggctagtgcagaagcaaaccctttttagaatatcatatagcgctttaagttacatttcttttgactttatagaaggaaagcagaagacagtgagttcacatgtctgcttcaagcatagcatggattaatggataaaatattagattgaaagcccaaaataatgcatttagtttcagaaacaaaactttcactttcgatcacaaattctcctcaaataatgttttaaataattatatttagtatcaagcaaatgagtgaaagaatagcttttttaaagaaggcaataatttatggaggacagactgaaattaaacaaacagatgaatgtgaaaaatcaaatcacatatcttgaaattttttgaaaagttattaaaataaaacaggacttgccctatcaggtaacaaaactcgttacaaagctgtgatataaagagagtgttgtatcagtcccagcaaagaaaactgtctcagcggaattaagtgcccataagtgtgatttgcatatggaaacttcatatatgaaaaacgtagggcattaataataggttagaaaagagtggctcttcaatacatagcgccgcattgatttgttctccatcttcacatgaagaacttcagatcttcatctcacaccgtgaagagacataaattccaggtggattaagcatatataaaaagcacggaaaaattttagaagaaaatatagaagaatgtctttctaatgataaggtattgaaggaatttttagaaaaggattcaaaaataaaaggaaaaatcatgaagaacattgataaatttagccaatagtaacactgacttttctttttttaaaacaaagtgtatctaaaaaataaaaccctaagccacagacttgtgtttttttctttataatttttttcaaactgcatatgttttcattcagctatgacagaattgaactgaggcaaaaattttggtatgaggtacttacatttattttaaaggcagtccagaaaacctccatgagaagggctgggaagtgaagagatggagggtgataaagccagtgaagactgggtgtgatcaagccagttaccatcataggcatctggaacataagtctgcttgggacctgcgtgagacagtgggaacgcgtgtcagagctatcccacttagggggaaatagagtggaatattcatttgccaaaaagccatgctcattggttgaggttagcttctgggacgtcaagtctggcacttcgagttactctgtgtgagtagaacatccagggaagctgacttcagtgtgcagagatgaatgagagggcctgtgagtatagaatccttacaatagctgctatggcttacaaataaaaaacactcttcagagattaaagagattttctattgactaacagataaaagacaagtagcaggcaattgacaaaaagggcaaaaccaaacaaaaaagaaagaaaacaggagcacacaaatgtctataggtggtcaatgttagtagtagttatggaattctaataaaaataaaaaactgaccttagacatataagcaaaaattaaaagccttagcaatacttagtagtgtcattcatcgcttgtctgagtgaagattcaaataatcaagttgaatagcaatttggttaatatctagaaaaactaaatgcacacatacaatctgacctccaaattctctttccagttaaatctgggacaagtagacaatgagataacattcattataatacaattataataaaattgtaagccctacaaaatatagggaaaacttaagtgttcatcaataggaaaatgaaaaagtgaagtgtattatgtttatagaataaaatgttatacacaagtttaaagtacatgaactaaagttgtatgtactaaactagaaataataaaacaaaattatatgcaaagaaacaagtttagagggttatatgtgatgttgcacagcctaaagtagaaaagaaaatcatttgtttagtgatgcaattctgtggataagagtgtacccggaaacgataaatagaaaatccgtatgatggttacttctgagcagaaaaggggttggttaatatagaaatagaacaacaaggtgtatttgtattgcattacttctgttaaaatatttgaaatacattaatgaaccacataaactttgacacagttagaggagtaggacatgtgagttaatattctgcatttttaaaaaaatagatcaaaagttaaaggggagacataagattgaagtctctgtggtattattaataattttcatcttaccaaataattattaaaattgaaagaaactttatgtgctaaactttctttttctttttttcttttcttttttttttttttttttgagacagtctcattctgtcacccagggtggagtgcagtgacatgatcttggtttactactaactctgcttcctgggctcaagcaatcctcccacctcagcctcctgagtatatggggctaaaggtgtgtgccatcatgcccagataattttctcttcccccgcttttttctttttgtagaaatgaggtctcacttcgttgtccaggctggacttgaaggagcttttctattgtgaaaagtgtagaagttacaaaaatgtccccattagccaagtcactgaatgcccataggagaataagataattattttaaacatatacttgagacatttaaccgtataagataaaacgctttatgtgaagtggaaacaaatgaatacatatttgggatggcaaataaagagaatatacagctctagatagggaagatcactaacttaaagaaaatttcagtgagtaaattgttgtgtaccattttggtaataggaatgacatattctggttaggtgaataatgaagtagaaagagacttgaggatagttgggtatggagtgggtgtagccaatgctttagtttttgagactcctaaaggtggattataattatttttgcctagggcaaataaaagggtaagaatagaacagagaagaaaattaagagtctgataagctcttgataatgttatagaagcaaacagaccatgtgcacaacatatagtgttcatttgttcacaaataagtggttttatactctgactgtatgaagtagcagtagaaattgcagagttcctaaagattaaagccatgaacacttctgtgaaatttcattcactgttcaacacaagatgagaaaacccaaacagctttcacctttaaataattttgtgtggctgggttgtaatcagataaatatctctaatacagttacatttttagaaactaatataaaataagaaaatatgtattcttcgtcaaaaatacttctggacatttcagagacttcttttttctccaaaaataccagtgccatagtcaatgaacactcctaggattgatggttccaagttgatatgagcttaagaaatacacatttgcttttctccaagactggtaattatttctttgactttctatataattttaacatgttattctgagatctaattggcaaattctttgtattttaggtttttaaaggggtggtcatctttattcacacacagtctgaggactatttaataaacatcttaactaggcacaaaggagaaggtggacctttaaatattattaaatgtctttatcattgaggattcttaagtactgcaatctaagagatttgcttactggatatttttgtttatttttttgatccttgaaaaatttggctggatataaaaatttggtgctattctctggtactgaatattgaactagtcctcctttattgttataaaataaaagagttatagttgtaacgatcaattcaattttaattgagtatgtatcatcatcagtcagcttgttttaaaaaaagaagtgtgtttagaagagctgctggattccatattccatgagttcattcatatgtgagaaatcttcctctttcttttatacttgactgataatatattgatgcatgggtaagtgacaagttttttttccttggaattctgaagatttttttaatagtgtgtttttttttctgccactgaacataattgtgccaatgtatgatgctaaccctttttcttacttttgtatgtgacatgttttatatctgcctgaatgcttacagaattatgttttcatacttgaagttcaaaagagagtaaattggcattgattattctgaattaatctttcttagaatgtgatgtacctttttcagtttcccttttatctcaggaaaaaaatcctttattaaagcttcaaatctttttttgtgtttttgttgttcaatttactagaattcataatggggttagggtccaattttccttaggatgaattatcttagtcatttatctatatctctacttttcttgtaattatttcattatatctgtatctctctcatacatttcaattatatgcaatgttcaactgtgtatttctgttctctgccatccctaatttacaaatttgtgtaatgctgttgctttgttgtaattgattttcataattataatctttctattttattcaaattctggattttgttactgggttcttattgtcttcaactcatttattaagttttaaaagtaataaatagtactgttgaaaatttttctttgattgagtttgcttccaaaatcagtttttggaaatattttctatacaatctcccccccttccccccttcacccctccctcctttcccccttccttccttccctccctccctcccttccctccctccctcccttccttccttcttccctccctccctcccttccttccttcctttcttccttccttccgtctttccttcttaggtatattcacatgtcttccacactgtttctttccatctggttcatgcttgtcgtagtcctacctgtgttatttttcattgttttcccatagagtaggttaatgtccttacatttttatgagctacagttttgaagaaattaacctggatatgcattttttttttttttgcaatttaagtggttagagaaaggttttgaggcaggagtataaattcacatgaggctgtatacagccttcttttgatggcccatatttccttctcttttctgcaattttgttaaaaatcctgtacaaaggttcctttgtactaatgtgaggtttattctatctgtgaatgtgtgtgggatgccactgggatgccactgtgctacatactattctctacaatttaatgagtagcattaagaattgacaaactcctaatggctcctcccatctccactgggatcctgtagcagtcactgatccctagggtttgctagtcctcagatattttccctatctttatttcaggttgcctgcttaccagtcacctgtttttctacagactgcaaaatattaatgaaaattagaacttttttgagtttcttttcagcaaaatgatggggaggggagagtttgtagatgaataatagaaaaaaaaaaagagccatgttgaattccctactatttttgttattggatggagtgtatgcctcaactttatttttctatttgttttttgttttcctgttgatgagtttttgtgattttttgactggtttgaaaccagtttataaaatcgaattatattctggagaaggaggttttaagcttcagctccactcaaattttattcaaaagtccatgtaacttctgacctaaagaactaaagactatgccaattttattcaacttaaggatatatcaactttattcagccagaataatacctaaatattaatatagatgttataaaacctcactggctctaagattgtatgcatggacaatatcattagttattttatctacactattaaaaatactaccaaatctagtatttagctgattactactttacagaaggatacaagaaaactgaaaattcacaaactaaaaatgctttaaattaataataatctcttgcattgtttacaatcccattaaacagcagttacattcctctgctacttctaggttaatcataaaggaagtccttaagtatgatacatgctagaatattctttttgaaatattttaattactaaaaagtgtatttgccattcaaaaggatggtgtgttgtgaaaaatatcactagacatgttgacagaagacccagctgtatatataaggattgacacttactaggtattcttaggcattttgttaaaacttttttttttttgagcttcagttttctactttagagaacaaagttattgatcttaaaatcactttcctttctacaattttatgacttcatgatttttatggttccttccaaaggaaagtatatgatttatgtctctttacattaaaaagtctttttttccctgagatttgtttcagatattcacctaaaaatcacctatgtgagactatcttttaaaacattttctgaagatcttctccttcatatctcccactgacctttcattctctttgcaattcctttttatcctcctcttgtctgactacagtgaaaccatatttactttccctttgctaatgcaaattcttgcttcctcgcccttcatcctttgttcccactccacatgtggttttttaccttgccatatgaaagtcactctcaccaagcatatttccctaatctacttttgtctgtaaagtggattatgaaacttttgaatgaaaggcattataccagaacatgctgaaccgcatagcacttaactcttctgaagggaagaactctattcatggcagtattcaaaaatagacctgtatttcggggaagaaacacgaaccaggctgggaaagattgctttttcctcgtaggggttaccacactttttacagcatcctacttggttagtaggaagctttgaaaaaaatatcagcatgttcttcccaatcagctgctagtttagatcattttcaaagaaatcccctgtgtatccagaatcctaaccaattcacaattctatgatttcagattgttgtgccagccacatctgtagctcaggcaagatttatcttctcaccatgttactttttaactttaataatcccagtgcccagaggtcaaaagattatttgatattgaaagagagtgagcctacttgtcagattttctcaatgctcttttatctaatttccctgctatcatcaccaaagtgttataccaacatttactttgtccacagaatcagttttccacatccgcttgctaagttctgtcttaacacaattccaggaagcttgttctgttttcttttctaagcgaaagaataaaaataaaatccaattaggagatcaccgaattaaagaactaaaagttcctgacatggtttggacctctaaattcccaagtaaaaatttgcatttcatgtttctgactatgtctttttagccactatccaaataaattcattgggtaatatttcgtactaggtaaatacatagcttctttgctgctgttttatttttaacgatgtcagtttcgagaacaaagtggccaggtatgtagtgtgattttgcttaaataatttgtactgtacctagaattatgtgtttgattaatgtgtctagtaaccctgctgctgctgctgctgctgctgagttgggtccattaacattaaaaataaaataactcacaaaaaccaggaaggctgcattattaagtcatttttttacgacagggaagtcaatgacagaagcatgaccctggtaaaattggttaggtgtagggaattaaacggcataataacatgttcagttaaattccttacattagatccttggaaacgttgtgtaaaaataagataaattttaaataaatataattgtggtggtgatcattctctatctgtattcattcttccctttcgccttttagagacgaaactaactgaattttacctgtgcaccacaagctacctgccctagttttcaatctttcttcagtttagatgtggtcatgtgtaggttgctttttcaataaaattgtaactatgagtttgaattagaaatttaagtgtaattcataatgcattttccccttcctgccttccctccctccctcccttcctcttccttccttccttttctctctctttcttccttcctttctttctttctctttctttttctttttctttctttcttttctttcttttctttcttttccttccttccttccttccttccttccttccttccttccttccttcctttccttccttccttcctttctttctatctttcttctttctttctttcagatgcattatgtgtctaattttttttgagacagagtctcactctgtcacccaggctggagtgcagtggcttggtctcgggtcactgctacctccaccttccaggttcaagcaattctctgcctcagcctcccgagtagctgggattacaggcgcccgccaccacacctggctaactttttttttttttttttctatttttaatagagacggagtttcaccatcctggccaggctggtcttgaactcctgacctcttgatccagctgctttggcctcccaaagtgctgagattacaggcgtgagccaccgcgtcctgaactctttatttcttgctttaggacagggtcttgctctgtcgcccagactggagtgcagtggtatgatcatagctcactgcagcctcaaattactgggcccaagcgatcctcccacctcagcctcctgagtagttgggaccacaggcgcatgccaccagtcctggccaccttttttattttttgtagagacaggctcataatgcacttaaaaaaataattaaaataatttgtttacaaagtgcttacttgtttatgtgatagtagtaattatttagctataatattttaatgacatgctttttcttccagtaactatttcagcatagaaatattatagacttaaggaatgcatagaaacttaatagactgtcattagaatgttaagatattatttctcctttttatttcctttaattttttaaaattcttacaatttaaggtgtttatactccatttttaacagttttttttaagatacacaccactgcacatatttaatgtatacaatttgatgagttcagacaaatgccaacaatgtaaaatcatcaccataatcaaggaatagacatgtcctaacagctcccattttctttgtgtccctttacttcttgtgtgtgtgtgagtgtgtgatttttgaacataacgtgagctttcaactctttcttaccaaattttgaaatgcacaatatcatattgttaactctaggcactatgttatacagcaaatttctataaccagtttatcttgcataattacaattttatacatatcgaattcttcatttgcccaactctgcagcccttggcaatcattattgtattgtctgcttctatgagtttgactattgtagatacctcatataattagaatcatgaattattttttcctgtgtgagtggcttatttcacttagcataatgccttccaggttcatccacgttgttgcaaaaagcagaatttccttcccttttaaggctgaataataatccattttatgcatatatcacatgcttctttatccatttatctgtcaaaggacacttaagttgtttccatatcttggctaccgtgaataatgttgtaataaacgtgggacagagatgcagatatctctttgtgaccctgatttcaatttcttgggatatatacccagaagtgggatttctagatcatatggtagctctatttaaaaatttttaaggacctccgtactgttttccatagctgttgcatcatgttacattcctacaaacactgtataagtgtttcaatttttctaccttcttgctagcccttatctgtttttttttgacagtagacaccctaaaggtgtgaggtaatatcattcattgtagtttcgatttgtatttccctgatgattagacattttgagcacttttttacacacctgctggccatttctgtgtcttctttggagaaatgtctatcagggtgcatgcccatttttaaattcaggttacttgtctttttgctattgatttgtgagttccttatatagttttgaaatgtatcccttatcagatgttcgttttgcaaatgttttctcctattctataggttgcctttcaatctgttgcttcctttcctgcacaggagctttttagtttgacatagtcccacttctctagttttgcttttatgttctatgattttagtgccatagtcaagaaatctttgccaagaccaatgccaagaaggtattcccctatgttttcttctagaagtttgacagttcagatcttatgtttaagtctttagtccatttttgtttgatttttgtgagtggtgttaggcagagatctatttttgtttttttgaaggtagtgtctagttttcccagttctactttttgaagaaattatacttccttacccattgtgtatccttagcactgttgctaaagatgggttgaccatatatgtatgagtttacatctggtctctttattttggtccacttaatatatctgtctttatgctagtaccatactgttttaattactatggtttctaccacttctattctgtaaagtcctggaagtcttagccagaaccattaggtaagagaaagaaatagaaggaatcaaaattgtaaaggaacagaataaaatgttctctgtttgtagatgacatcatcttgtgtgtagagaaccctaaaactccacctacacaaaatgttagaactaataaacaaattgagtaaatatgcaggatacaaaatcaacgtacaaaaaatcagttgtatttcaaaacattaacaaggaaccattctaaaaataagctaaaaaacaattccatttacaatagcataaaaatcatacaatatttagaaataagcgtgggggtgaaatacttatacaatgaaaactgcaaaacattgatgacggaaattaaaggagacacagataaatgaaaaaaaacatggctttctatggattggacgacttaatattgttgaaatataaatattagccaaattgatctacaggtgaaatgctatattcatcaaaatcctaatggtgttttttacagaaatagagaaaagaatcctaaatttcatttggaaccacaaaagacccagagtagccgaagagatcttgagaaagaagagcaaagctggagacatcacacttcttgactttatactccattttaaactttactttttcagaatatcctagagcaaaattcatattatccttatatatcttttgaacagtagaaatttgtagacttactattatcataaggcatttgtttttacagcccagtgttccatctccttggttagtaatattctcttgaagacattggccccttgtaccttatccatatcattacagagtggggatgatactggttaatttttgaaattctaatacttagccaaaatgtgaaactctttgataaattcacaaactatttgcagcatattgtaaagaactttaaatttagttatcttgtttatgagtttaaattatctagatgacttttgactttctttatcttttgctattggacatgataaactcattcattcaagagtacatacatttcatgccctactaacaccttagatgtacttatctattgatgacacattttctatgctctttactttgtattaacgagattacaaatcattgattctcaagtaaagctgatacataccagattttgagatacaccatggcagtcaacgtcaactgtcttcataaagatagtggtaaattaagcacgtcaacttacattttgactaataatacaattaatttttatgtataagatagtaattttaactgtgcttgaatatcaaaccaactataataagaaaaaaatcatgtcaattgtaacatttcagccaatttttacataaaaggccttagaaaggtaatttcaagattttggagtatgtataacctaatcattatttatttggcacttctattttaaattgtctattaccttttctcacataaaaagagccatgtttttacaagttgaatcagaagtctctactctgtgagggtaagaaagcaacaattaaccattccagaactttacataatcctatgattgtctccctctcttatataaaacattctgccacagcaaacaagcaggtgcaattacagccagactgagatttctggagataaagaataaacaaagatggcatgaatatgtcctaaaacacagtaatctaattaaaatatgcaattaaaatagttaatgcaattttctatgtcaagatactacagaaaaaagaagatacgttttgaaacattttaagactcctactacataagttagtatctatgctgaacaagatttggtgtgctcacaatttaattaacttcaggctctcaataaccgtgtgataaaaatagagcctaaacccctcagaagtctgtatctgctagatgtttctgatctagaaaataaaattaactcttcagtgaaatgatccaaatagattgccaagagctaatcttgctcaatgtgaatcgatccatattaagaaaataattaggagaatgctgttatcagaggcagcaatgtgtcagtcaaaagggtagcctacacacatataaacacgtatacacacaatcacacacatacacacatacacattcatgcacaaacatacatatattcacacacatacacctacttggaatataattgccagaaatgctatatctgtttcacaaggaatttgttcaaaaaaatgtaaaaagctatgctattgggagaagttgagcttggctagcaatttaagaaaagcaatcacttggatcctggtctctttcttcagctaaaaggtaatgaaatgtattgctcatttgttctttctgtcatgtccaattaaaacaaaagaaatgaaacttctctgtctcttccaaacaggctctctcctatggtttcatttcacccattagatactttaatgcttgctactagctggaagacgatacccaaaatacagtgtctaagggataccttacttctgtggattagaggtgagagagttaagaaccttattttaaaaagtgttctgtggtctttctgcatctcttatcatttttatctgttgtagcgatggctaagtggaaagagaatgtcattctgcggccagtactgtggaatactaacaattttacagccacatacgtagaagcgacagtggccatatctgtgtgcgaatggtgttatctgcctctctacatcagctggatgggctacaaccttaaacttgggtcaacctttctgcccttagggattgatctatacgtggcctcttgctgaaatagggaaaatgttacccccccaatcatcttttaccctgtagccctgcccattcatctctttgatttggtctacgtattcttttgctctataatctattaactattaaacgttatagctgctacttatagctgtgtttttagttcacagaagacaatattgtgatttaaatatttaaaaataatattgaccaatctctgctagaaaacattgttaaaattggaatctccagagaaaagaaatgggcacctctttgtgacaatggctgttgattcagcgtatgctatacatggtagatcaatgcaaaaacaacggagttcatactatttgcaattatgggattgcctcattaaaaaatgctatcatactgctctgaaagccgaccatacaagttagatcattcttgtcatacccaactaaatcagcgttgagccagggggaaaaatcactcagtgaatgtgcaattgttccaagaatgtaattctctgcaagcctggtagaaacagccaactttaacctgaaaccagttttatctaatagttgctgaagcaactccaaaaacagtcttactcattgttgtcacttaccgattaaaacttaccagctccccaaaactttcctagtgccagtgaactttcttgataagcaatatgtgacatttcctctttttttttttttttttttttttgagacggagtctcgctctgttacccaggctggagtgcagtggtgctatctctgctcactgcaagctcggcctcccgggttcacgccattctcctgcctcagcctcctgagtagctgggactacaggcgcccgccaccacgcccagctaattttttgtatttttagtagagatggggtttcaccgtgttagaccggatggtctcgatctcctgacatcgtgatccacctgcctcagcctcccaaagtgctgggattacagatgtgagccagtgtacccggccgacatttcctctttttctaaaaactctaaccttctctttcttctttggacataccaaagaccacctggtgtgtgtgtatgtcccaaattgcaattcttgctttcctccccgaaattttaactatggagatccacctctacgttttatttgactttgacaccagcctggtagaaaagtatccttctctgcttcactgacatgaaacttagccatgcatctgtagtcgttcctgtaggtggaaaatacatcctgccctggtatgtgactgtttttggataaagaaatgggaatacaagcaaatcagaatgtgattggttatgtcttttttcccccttctaccatgagaaaagtaatttcccagatacaattgttctgtcaacatgggttgcaaagtgaagatatgtgaaggagagtaacagctaatcaacaacggacacacaatgtgaacaagaaattgacatttgtttttgtttgctactgggacctgaaagtcatttttttaaatgtagcataccgtagcctagcctgagtgatatggtaattttaaaaatatgtataggaaaaggagggctgtaatttcctcagcactagactagacatgaaaaatttgaagttttcttcacatttttctaacagtgttacctgaaatggttattgaattcctccaatgctagcttctgcgtctatgcaatgaatggtttggatgaggcaatgttagccacctttaacatcctttgagtctgtgattcgagtaaacctcaaagcatggctgaagtcaccattatttagatttgctgaaatctccttctttttattacttccttattaagtagctaggtggcagtttgtggttgaatagaacacaaagtctattgaattttctatttctatgtggctagggaaagatcttcaatatttggaagtataataaaaattctcaagttgtagcgaaggttaaattaaccactagccataccttggatttagtaaaacctgcatgttacctaaaacaattagtaatttgcctttgacttagtgatatttgtcattgttaaagctgtcacactaggtcaatagatgcaacaggtaacaaaagcacttgatcttactgctgtataaaataagctttttatcttggactttctgttaagttccgttaagagagtttttcaaatagcatggccaggctttggcactgaggatgatactgcctgcgagattcacaatgtagatgtcactttggctctactcagataagaggtatcactgcactgagtcacagcaatatagagtcagatggttttctgctatgtaggctttctccgttcaaccccaagaagtatctagggaggatttcaaaagtgtatggctttaacacttaaaacatcattcctaaatatcatcctgaagcttgttagaaatgttgaatcactctagatttattaaataaggatgtgcattttaagatctccaggtgacttatatgtacactacatttctaaaaagggagagcttggagaaactaagatattctcttttgtagctgttattttacatatatgacacggaggactatatcactaaacactataccactaatattggaaaatatcatagcactaatataggatcaatgtaacttgcaatgatgtaaaaatatgcagcatatttcaaatggattctcaatcttcaaatattatggaagaatcttgatttggtgtttcaagatcttggtcacagttttcagtactccactctgattgtaaagggaaggcagtttgcatagaggttgaaagtattggttctgggtctaattttttgagctaaaaccttggcgtcttgttactgtgtataaaactgtggatagtttttacttaattttcctgaattttattttctcatcaacattatagggataatagttacctaatagttaaggaaaatctttagaaaagttatttgagaccagatgtttctatccctggtcagttaacaattttttctttcttagggttcattaatgaagttgtaaccagtgttttaatttaggaatgccaaaggtcagtatatatttttgtaagataactatatggtttcattaaagaaaaatatttgacatatgcaatttctattcctttgtttgaggattgtactctgtcttttgaatgctcttctccttaatctatttatggaatggtttgctcctttatgtaagacatgaataagatttttctgatacaaaagtttccccaggaagataatggattaagccttatggagactttaagtaaattttattatcttctataacttcaacattcactgctctgagaaaaatgattatcgatacaccccttcggttatgtccactgaaaattacaatgacagctttgggcatgggacagctaaaactacgagagtttctgtcttcaggcagagggctgaaagcaagtattactctttttttttttttttttcagactacgtctggctctgtcacccaggctggagtgcagtggcatgacctaggctcactgcaacctctgcctcccaggttcaaacgattcttctgcctcagcctcctgagtagctgggattacaggtgtgcaccatcatgcttaagataattttttgtattgttaatagagactgggtttcaccatgttggcgagattggtcttgaactcctgacctcaggcgagccaccctcctcagcttcccaaagtgctgggattacaggtgtgtgccaccacccccagccctgaaggcaagtattactcttaatgaaaaataaatggaaggtgaaacctttggtgacttgataatttaccttcttatgtttatttaaaaaaaaaaatcacaatgtggtttacctctgattgaagatgcatgtaacttgagcaacagatcccaaaacatcacttcatgatgttattttgaaaacaggataaaatgatatgaatcatataatgataattacttacagttaatgatcattgactatgtactatgtgtaattctaggaattttacatgcatttagttattctcacgataaccctatgatgttaaacagtagtagcgtggcaggtgctacaattattcccatttatgagatgtggaaactgaggcacaaagcatttaaataaatagcctacggtatcaaagccgatgactaacattttcagaaaataaattcagatagtctggatcttaacactaaattcaatagttttgcatgtgtcaatttagctgaattctgatttcattcttcaaatacccttttctgtatagctctgggctaggttgggcaaataagagaaacttgtgagggttagcaggtggatgggaaatagcagtcaggaaattaggaagttggtgccagggctcccgaattactgtaggtctcaaatgctgatgctgatctgctagctcgtctcatttgcatggggctcagctagcgcagatttccttcaggttctttaaatcttaggtcaggctcatatgcagtgcctgtgtggagggtcttagcttcctctgcagttcaccaaaggcaggttactcaaggctagatgtggatttacgaatgataagaaaagcagagactggcaaatatgacttatagtttactcttgtggcgtctcctctgaggttttgctttggatttctctttctttaggtccagattttattcacaattgcctcctcccccaactgcctgcccactcccaaatgcagaggcagcagcctgctatagatttcgctgtctcttgtccttgattccttgttagtgacctttctctgatcctctgaccataccctttttgttctttgcttctgtgtattcactcataattgtggagagttcagtctgtaaaataaattctttttttttttttttttgagacagagtctcgctctgtcgcccaggctggagtgcagtggcgcgatctcggctcactgcaagctccgcctcccgggttcaggccattctcctgcctcagcctcctgagtagctgggactacaggcgcccgccaccacacccggctaattttttgtattttttttttttttagtagagacggggtttcaccgtgttggccagatggtctcgatctcctgacctcgtgatccgcccacctcagcctcccaaagtgctgggatgacaggcctgagccaccgcgcccggcctaaaataaattcctcatttgtattgctcagtggttccgcttccctagtgatacactcaattcatatgcatctctatgaaactgagaaaatactgattctctaaaaaataaaatattccctgatattaacagattatagctcaaagtgattagcataatggcagggagattataatcatttagtaatgttcagtatcatccttatcttcatcttcttttttttcttcttgaaaaattaactgaagtatgatcacaaagcaaaacataaaggagacattcaagagtgctttatttaaagaaagagaagtttcagcctggcatcaataatttgcctaaatattttaactgaaagagaatgctttcacacggtctcaaaagaaaagccattttcttttcatctgaaaacaagtgttttaaattttttttatcagtagattcatagtgttatctgaggtcctacatttattctttaagcttacatttacctcaacaataatttccaaaaatcatcacctctgctaacttgagagaagattctattttccagttactgaatggtcctttttcatgctattcaaatctgaatatcttgcttaaactccagtgcccagactgctcccaattgtctagtaaagctctcagcccagccaaacgttgtggagaaactatacagcaattcctttttgcaacactcttgttttgacatctcagtgagtctatttacatgtagtaatttctcagtgccagttaaagtcagaaaaagtgattcactgtggcattcttgcaaaatatgacagatgggctcattagtcgtttgattcataaaagccatcatgttgttttgcttaaaataagaagcaaaaaataagcaagtccttgataggtttaattcagatcagagcaaagtaatgccaactctgcagattcatgtaaagaaccgacaaaaggagccgggggaaaaaggactgtgcaaatgaatgcattattctttgtaaaaaagttatgagccataaagtaatggttaaaaaagagctaggcatctgcaactaggcaaagagattagaagaaagcaagaacaactagtaagttatatgctatttgttgtgttttcttgatgtaaatatagcagtagaaagaatgaagacattaaatgagaattaagagaatatatgtattcatatatattaattcatatatattatattatatatgaatattatatattcatacatgtgtgaattcatatgtatgaatacatatgatataataattttatgaatatatgaatacatatgaattaatatgcatatatattaattcaagatgccagagacattaagaaaagagtaatccctatcaatggataaataatatgatacagaatagtatttgttagtaaagaagtgaaaatttaaaagaatatatatttggtgtgtcaacaccaaaatgtcttccagaaaactctggtagagtagttgcatgccaacagaaaactattcttatggaaattttcatttacattgattagctattaatgttttgttgcaatcagcaaacctgactactataaggactccacagtcaaatttgaatttaaaattatggatggtagattgtcaaatcttatttgttgtcttgcctttaaacaattctaaaagaaaggcttcatatcttgcagaatttttaattgttaagtaatatcaataattaataataacccaggagattagtgaaaagaagtttcccattgtaactcttcattgagcaaaagacttctgtcggtcaattaaaaacatctctattgctggagaaataatggttctttcactttcttatgagttgtgtccatttctgtgatggtcttacatgatatgtgaatgaatcataagttattcctcaaactcttaacaagtatttatgtatctgtgtagatcaataatttaattacctgtgtagaaataagaacttatgaaagcttcaaatgttgtgaataataacgtagtggaaaattcttttgcctcatccacatttgggagaaaatgcttaaaaaaatctcccaaatatatctctacacatttttcatggatattttgataattcagatgcatcagtattctgggcttcaagcactcttgctgtaaaaaacccttaataacctaaatgcgatacaagaaaaatacattatttggtggcaaaagataaatagaaaaacattaacattgattttatgctctgtgccaggctctgtgctatgagtattaacaaaatattaataaaatatctttttattcacctatttatttgcttcctaaatatttgtaagaactcttttatagcctgcatacctttctctgtaatgatgtcttccttttcttttccagcttcaagggcccacaattactttattttacgaacccttatttagcaactatacacaacacacactcacagtgacaaacaacgtaagtagttgtactgtgcagataataactcacttaatcctcatgtgttctatgaagtaggaattattattatctactttttatgcaaaataccaaggagtagtatagttaattaacttatctattgtcacttagcaaataagtggcagattcagaattccagctcaggcacatgatctggctacaaaatgaagctctcacgtaaaatactgtgatatgtaagagaagaaattttataaggggcttaactcaattacctccactttctgacttgaaaactatttgattttattaaaacttcatgatatgtcaacaaaatataaacaaaagtcaatatgctaaagatgaagaaagaaaatccttacctgttttcatctttaaacagctcttctgaagcatgcaaaccctctttttggtctacgctatgtgataaaaagctatttgttttagccacagttaatagaggactttagtaatgtcaacaaaattggttccattttgaaagtctgttgaacttcacctatgatatttcatgcattgtcaaagatttgttttatttcaaaattatgcattttcattgataacatttgaaaaataagaatgtggaaaaaatgtgttgccaaacggtttgtcaattaatagtttagtgatcacatatttcatttcttcctagatgacgcacatgccataatctaactgtcttctttttgccacaggcattaaaaagaacaaaaaatgtctcagttggattttatgaaacaaacacataaaggaagtgttcgcctctgcatttctcccctccgccatgcctggtttagagtgattaatcccttttggtgtttgttaaaaaacatgttattgatgttattagaagcccatttcattgtaattaatatcactggttattagctgttcttacaaaggaaatgattggctctaggcatcaacttatgtaagttgtataaggcagcagccctctgagaacagattcacttctctctccttcgctagctcatttgtgtctgtctgaagcatgcagtgttaattgcgtagcccaaaatctacccgctccttgctctttgccaacagagccccagtttttatcagattgtgaaagtgtacagcttttttagaattatagtcagtctaaccctctaagccacacacacttattttccattctccttgccttacttaactattacatttaagggaataaaagtcaacatgctgaagatggataaataaaattcttaactgtttatttcttttaacaactgttctgatgcatgtaaactctccttttggtctatgctttgtgaataaaaagctatttattttagccacagttaataggggactttagttgcaggcaaaaacattcattactacttcaccatctgaaatagacctgctcaggaccgacctacttccacaaaggctgaccgatcaaaacatgactgagcatttatattttatcattgtttacctaagaaatatacttattcaaatcattcttctaaccaggaaagtgtttctctaccttttagagaaaaaaacacctcagtgtttcaaatctgaatttgggagttttttaaaacatttttttcccaaatgtggataaggcaaaagaattttccactatgttattattcacaacatttgaagctttgataagtcttatttctacacaggtagttaaattattgatctacacagctaagagtttgaggaataacttatgattcattcacatatcatgtaaggcagtcacagaaatggacacaactcataagaaagtgaaagaaccattatttctccagcaatagagatgtttttaattgaccgacagaagtcttttgctcaatgaagagttacaatgggaaacttcttttcactaatctcctgggttattattaattattgatattacttaacaattaaaaattctgcaagatatgaagcctttcttttagaattgtttaaaggcaagacaacaaataagatttgacaatctactatgcataattttaaattcaaatttgactgtggagtccttacagtagtcaggtgacttgggtgcgttaaaggtattcagtttcataagggaagctgagcataaaagtttggaaaatttgcaggctgacaatttgatagaaaggaaaaacccatcttccgaggagaaattcaagcaggctgcagaaatttgcataagtaacaaggagccaaatgttaatcaccaagacaatgggaaaatgtctccagggcatgtcagaggtcttcatgacagcccctcccaccataggtctggaggcctaggagaaaatgattttgtgggccggtcccagggcccccttgctatctgcagcttatggacttggtgctctgcattccaactttggctgaaaggggccaatgtagagtgcaggccatggcttcagagagtggaagccccaagccttttcagcttccacatggtgttgagcctgtgagtgcacagaagtcaagaattgaggtttgggaacctctgcctagatttcagaatatgtatggaaatacctggatgtccaggcagaagtttgctgcagggtggggcgctcatggagaacctctgctagggcagtgcagaaggaaaatgtggggttggagcacacagaggccctactggggcaccacctagtggagctgtgagaagagagtcactttcctccagaccccagaatggtatatccaccaacagcttgcactgttcacctggaaaagttgcaaaccctgaatgccaactcatgaaagcagctgggagggaggctctaccctgcaaagccacaggacagagctgcccaagaccatgggaacccacctcttgcatcagcatcagtgtgacctggatgtgagacctggagtcaaaggagatcattttggagctataaaatttgactgtcctgctggatttcagactagcatgggccccctaaccactttgttttggccaatttctcccatttggaatggctgtgttaactcaatacctgtacccccagtgtatctaggcttttgattttacaggcttataggcagaagggacttgccttgtgtcagatgagactttgaactgtggacttttgagttaatgctgtaatgagctaagactttgggggactgttgggaaggcatgattggttttgaaatgtggggacatgagatttggaggggccagggtggaatgatatggtttggttctgtgtccccacccaaatctcatcttgaattatactcccataattcccatgtgctgtgggagggaaccagtgggagataatttgaatcaagaaggcagtttctcccatactgttcttatggtagtgaataaatttcatgagatctgatggttttatcaggggtttccacttttgtgtcttcatcattttctctttctgctgccacgtaggaagtgcctttcaacttctgccatgattctgaggtttcctcagccatgtagaactgtaagtccaattaaacctctttttcttcccagtcttgggtatgtctttagcagcatgaagacaaattaacatgcctacgtagatgtatgaacaaagtttctagttctagtgtttgtaatttgagattacttatactatacttgcagctttgcctagttttcttcctaaaatgttcaactacatgttactctcattgagtaccttaatatatttcacatccattaagaattttaaagagagatatgtatttttgctcaaataatttcttaatttaaatatagttttaattcaccagagcatgaatccaagtagttaaaaatatgtatgttgtatgttcagctcatgaatcttcccattatatttactattactgattgatgcatgttagcacttatcaccttttcacaatgttagcatcagtctttgtgaaagctgtacctcttagtaaatatctgaaaatattgcattaaaattaaaatttggggtcacaaaaaagtcactgttagatgtgtatcaatgctggtgaataatcatatttcacaattagtgacacctttttctatctgcttgaagaaggttatatagcattctgtttttgatagtttaaatggtttctctcaaaagatgtgtagtatctgtccaaaacatttggtcccataaaaaagaaactatgttttgccttgggtaattttatgttgcttgatcaaagatctagttacttattttggcagcagaaaatatattggtgaaggtgttcacctagaatgaagcttcaattctatggggatagattcattctttatcttggtggtggttgctcaaccaaaactgggcatttttcagcttgtccaactagtgtggcaattgttattaggaaacttctttgacgaaatcatcacttatgccatacatatccaataaaagaagagcagaattactacaatctgctgctctgtatgctggtgcaataacaccaaatattagcttgtcaaattcatcttatgcaagtttgtgatcaaggttttccaatcatttccggatacaagtaatcatgagacacagggaaaacaaggagaggtctgggcccaccaatgtagctctgatattcccttcttgcagcagtggaatgcactctggtccacaatatatcaaatgtgtaataatgtatgcagctagattatttacatagaagagagttcttttggtcttaaaagacattctttttattcttataaattatacagcttttgtgacattttccaggcaaatgtgctccaaaactctacacatgttagtttgcttagcatgtacagtcttagaacagatatatctgactaaaagcaatccataggaaggaactctccagctagcaagaccattagttcatttgttattagcaaattagcaaattgtccagatcaccatttttctttgctgtaaagtctcccagtaaaaagagaaaaagaattttatacttgctgtgttagtttatagaataaaaatttgtgctccatcaaggctacaaatgtcttaagaaccagcctagcccaaggatgttattgcttttatcctgaaatgttttatattataataaatatcctgtgtacttactttccagccaggtttttcctttgtaattgctgtattttatgcaggttgacatacttcttaatatggtctcacattgaccatattatgtaaagttttatcatggccctatcccttgattctgggtctcttggtccattctttctgttttccattgaaacttcggaatttctcccctgtttcttttctttctttgtcttttcaaagatgatattcaaggagagtagttaaatatgttgattcaaacaatagcttgtatggcaatttaaatttcattttaaattattgtatatatttttccttcttttctccaataagaacttttttccaaagcatagttgtgttcaaactatgagtccactaaagcaattataattaaataacttgaatagtttaatttaaaatgatttctcatatgcataaaatttttcttactaaaatttccatttacttttacaagtttttccactttagaaaatataggatttatctatgcgatcaaaaatgcctactagagccttttagcttttctctttctgaaatgaaaatgaaatgtaccaaattacctttggtaaatgcactttctaattcttctatgctacttccacatattgatttctataacagaaaaagtatatatgtttactaaagtgtgtcaatgactttcttttacttttaagaaaataagtaaaattattgggtgaatattcaaggaattttaataaagttttcttacatttatcttcatcttcagatccttgcactgaactgaaaactttaattctgaataatttgtagcttcctgaatacattttgctttgtcatgaactcatcccttcatataaagtattctcttacacttgggtttctggattatcatttcctccattcctctttcctacttggaggcctcttatttatcctttaagccatattccaagagttttctcctctgataatacttctctgaactcttctattatttgtagtttgagacactatgtcttcatcaatttcctgagctatttatgtaatatttagtaacattatgaaaataatagaatcttacttttgtgtcatgttaagggttgaattgtgccttgccaaaatacacatgttgaagtcctaaatctcagtacctcagattgccaccttgttaggaaacagggtcattgcagatgtaactagtgaaattaagtggaggacataatggagtagggtgggctcctaatcaaatctgaaaggtatccttataggaaagaaggttatgtgaagacacagaaatacaggaagaatgaaccgtgaaatgggagacagagattggagttatgcttccatacgctaaagaaagcatcaggctaccaggagtcgggagagtcaaggtagcatccttccctaggggcttcagagagaccacagcccggcccacgtagattttggatttccagcctcaaggacaaggagataagaaatttctgttgtttaaagccaccagcttgtggcactttgtttaggcaaccctaggaaactgattgatgtcatgaaattttagatgtcttgggaaacagtaaaattcttctctagtttttatactcatcaatcatgatgtgattttttttcttctccgaaaaagtggggactaattatttgtgagagttaactatttttgtcaagtaagtaatgcaaagattcccgtgtacctttctcggaaagataactttgtatcatggcaaaaaattgaacatttaataagtaacatggtgaaaaatcccaatttagaaagtgtatgagtttacttttttcatgttaatactaactagcagccaatatgctgacactgaacataccttaaatgggggaaatggagtcattgttgcacctgaccactgctagcaatgtttgtcctggtaagtatttaaaacattttagtgtctcaaaagatggaaaagaatggcctaatccacgctgactgatgagaataactcaggaacagcaaattaaaaccaaattggtgttatccacatcttgtgcaactcttgtgttgaaaataaaggagcaggaaaaactttttgattaaatttctggaacttctgcctcatttatcttaaaaataacagagtttaggcctggcatggtggcttatgcctgtaattgtaacactttgggaggcagacgagggcagattgcttgagcccaggagtttgagaccagactgggtaacatggagaaaccctgtctctagaaaaaatacaaaagaattagacaggcatggtggctgaggtgggagaatcacctgagcttgagaggtcaaggctgcagtgatccatgattgtgctactgcactccagcctgggtgagaaagtaagaccttgtctcaaaaaaaaaaaaaaaaaaaaaaagaaaataacatagtttgaggatataaagaatactcatttcagattttggtaagggccgagtatgttcagatataccttctagctgttattattaactttatacattttcctaaaatgttatgatgagtagtttgttttggagttttgcagataaactgtaattaacatttttcttattttgaaaagttgaaaaatatctgtccttcagtttctggaatttgtccagtttgtttttaaaaaaataaatgatctggcaattggatactcactacttactctgaaaagccattgttgccaatttggcaggtccaatacaggggtaaggagctctttcacatggatccatttgttatactactgctctgcggtgcaagattaaattaatctctcctttgttttttctttcatgtgaaatggcttcaaatattttattttggctagtatcaaccttctaaaaagatagcatatacgtgttcgtacatccagctacttcaataaaaggaagactcaccataatctatacctgcagctacatctacattgcacgtatactcatatctatagctaatctctatctctacacacagagatacatgcacatatatacacacatttatatatgtacacacataagtataaacatgcataaatatttttatattattgttactgttcaattacatatatatgtattatatatcttagaatcagagagctaaatattccattttttgtgtctttttctatcttcagttttaagatgctcttttcctaggtaatttaatatccatttctcttaaagaagataacagaagcagacacatatccagaatagtgatttttaaaaatatctatgtaaacagtcataaatctggtgtatttacacaactatttgcagaacaattattatagtttggattactaccctacaggaacataactgctttgtaagctttctaaaatatttttttctaataatctcttacttcttctgaataggaggtatatattagctatatcatttgataaacatcttaatccatccaatgttttagaaatatttgaaatagaaattacatatttggaagaaagattattaaaaggcactattagttacttctaaataaatacatttaaaaactcataaattaaacatcatgcataagttatctagccttatataattataatttgattggacaaattgagtctttcatctgtacttagaatttatttgtaagtactttaaaaatagatattatcttttctaaatttttttcatccttgatgttccttgaggaaagaagtccttggaggaagcaataacctctaccttgtatttatatccatccttttatttcacttacttgagataaaaatataaaaaacaccaattttttttacaaaagataaacattacttgaataccctttatttccttctcctgcctaattgccctggccagaactaccaacactatgttgaataggagtggtgagagagggcatccctgtcttgtgccagttttcaaagggaatgcttccagtttttgcccattcagtatgatattggctgtgggtttttcatagatagctcttattattttgagatacgtcccatcaatacctaattcattgagagtttttagcatgaatggttgttgaattttgtcaaaggccttttctgcatctatggagataatcatgtggcttttgtctttggttctgtttatatgctggattacatttattgatttgcgtatattgaaccagtcttgcatcccagggatgaagcccacttgttcatgggggataagctttttgatgtgctgctagattcggttttccagtattttattgaggatttttgcatcaatgttcatcaaggatattggtctaaaattctcttttttggttgtgtctctgcctggctttggtatcaggatgatgctggcctcataaaatgagttagggaggatcccctctttttctattgattggaatagtttcagaaggaatggtaccagttcctccttgtacctctggtagaattcggctgtgaatccatctggtcctggactctttttagttggtaagctattgattattgtcacaatttcatatcctgttattggtctattcagagattcgacttcttcctggtttagtcttgggagagtgtatgtgtcgaggaatttatccatttcttctatattttctagtttatttgcgtagaggtgtttgtagtattctctgatggtagtttgtatttctgtgggatcggtggtgatatcccctttatcattttttattgcatctatttgattcttctctctttttttctttattagtcttgctagcggtctatcaattttgttgatcctttcaaaaaaccagctcctggattcattaattttttgaagggttttttgtgtctctatttcctttagttctgctctgattttagttatttcttgccttctgctagcttttgaatgtgtttgctcttgcttttctagttcttttaattatgatgttagggtgtcaattttggatctttcctgctttctcttgtgggcatttagtgctataaatttccctctacacactgctttgaatgtgtcccagagattctggtatgttgtgtttttgttctcattggtttcaaagaacatctttatttctgccttcatttcgttatgtacccagtagtcattcaggagcaggttgttcagtttccatgtagttgagtggttttgagtgagtttcttaatcttgagttctagtttgattgcactgtggtctagtcaaattgtccctgtttgcagatgacatgattgtatatctagaaaaccccattgtctcagcccaaaatctccttaagctgataagcaacttcagcaaagtctcaggatacaaaatcaatgtacaaaaatcacaagcattcttacacaccaataacagacaaacagagagccaaatcatgagtgaactcccattcacaattgcttcaaagagaataaaatacctaggaatccaccttacaagggacgtgaaggacctcttcaaggagaactacaaaccactgctcaatgaaataaaagaggatacaaacaaatggaagaacattccatgctcatgggtaggaagaatcaatatcgtgaaaatggccatactgcggaagaatcaatatcgtgaaaatggccatactgcccaaggtaatttatagattcaatgccatccccatcaagctaccaacgactttcttcacagaattggaaaaaactactttaaagttcatatggaaccaaaaaagagcccgcatcgccaagtcaatcctaagccaaaagaacaaagctgaaggcatcatgctacctgacttcaaactatactacaaggctacagtaaccaaaacagcatggtactggtaccaaaacagagatatagatcaatggaacagaacagagccctcagagataacgccgcatatctacaactatctgatctttgacaaacctgagaaaaacaagcaatggggaaaggattccctatttaataaatggtgctgggaaaactggctagccatatgtagaaagctgaaactggatcccttccttacatcttatacaaaaattaattcaagatggattaaagacttaaacgttagacctaaaaccataaaagccctagaagaaaacctaggcattaccattcaggacataggcatgggcaaggacttcatgtctaaaacacaaaaagcaatggtaacaaaagccaaaattgacaaatgggatctaattaaactaaagagcttctgcacagcgaaaaaaactaccgtcagagtgaacaggcaacctacaaaatgggagaaaattttcgcaacttactcatctgacaaagggctaatatccagaatctacaatgaactcaaacaaatttacaagaaaaaaacaaacaaccccatcaaaaagtgggcaaaggatatgagcggacacttctcaaaagaagacatttatgcagccaaaagacacatgaaaaaatgctcatcatcactggccatcagagaaatgcgaatcaaaaccacaatgagataccatctcacaccagttagaatggcaatcactaaaaagtcaggaaacaacaggtgctggagaggatgtggagaaataggaacacttttacactgttggtgggactgtaaactagttcaaccattatggaagtcagtgtggcgattcctcagggatctagaactagaaataccatttgacccagccatcccattactgtgtatatacccaaaggactataaatcatgctgctataaagacacatacacacgtatgtttactgaggcactattcacaatagcaaagacttggaaccaacccaaatgtccaacaacgatagactggattaagaaaatgtggcacatatacaccatggaatactatgcagccataaaaaatgatgagttcatgtcctttgtagggacatggatgaaattggaaatcatcattctcagtaaactatcgcaaggacaaaaaaccaaacaccgcatattctcactcatagatgggaactgaacaatgagaacacatggacacaggaaggggaacatcacactctggggactgttgtggggtggggggaggggggagggatagcattgggagatatacctaatgttaaatgtcgagttaatgggtgcagcacaccagcatggcacatgtatacatatgtaactaacctgcacgttgtgcacatgtcccctaaaacttaaagtataataataaaaaaaacaaaaaacattattaatttctttctagatcatctcttataccagaaaatggtaaaattaaaagacatcttttttaaaaatgttaaggaacagtaattaatattgtttcatatttgtatggtgctttatactctctatcacaaataccgtctcatcatttcacagtaagaataactgccagcaccataagctatacctggccctgagtcacagtaggaaaatcagcagcaacaaatacctgataacaaacaataatctattttaattatatgcaaagtgtatatgcttgtatgtacttatttattgtgaaaattatgaatcagaaaacttttctgttagacatgactgtatatcaatttatgtagatttaattaatgacttcaaataattataaaataatgctttaatgctaaacgttgtagaacattcttttgttttccataaaatcatgaagcccagtagtctacatgattttcttcgaaatcttttaattaatcagggctctgaattctttcttataaatcttctttcttatagttaaaaatgttgaaaacaatcaactctaaaagtcaattctctctttatagtcagttcctgataatgtctcccaaatgatcctcagaaattactgctggccatttgaggtttacacatattcatctctgtatttgcttttacaaacttacccatggaaaatgatctttttgttataatgctttgcattgaagtagttcattatatttaaaaatttcaattaattttgctaatacctcatgttgaaggagcaagaatttctatgatcatataattgatggaaaaactgtagcacagagagtttaaaagatttacccagagatattcatcaagataacagtttagttgatgataacaatgcagaataacctatttttaagcagtttttattctttactcaaagtagtcttttctaagtatataaagaagttttgaatgaattataaaagtaatgaattttttaaacatagaacatttaagtattatggtcatcagaatataaaatatatagcacagaacttttatactaactgcattatttttccaattcaaatagcattggtcatcgtgttttatagaaatagggttttgaatgtgggagtgttatctcttgacactagacagtagaatttacaaaagcattgtgatgaaagtgacaagaatcaataatgggaaggagaggtataaattaaattggatttatggatggaaaaaaaagagactagttagatttagaggcagaaaattacagcacaaagagagactagataccatctttaaagctcttattgaaatgtaaaatatttttagtagatagcagtgtaacccagttcagagagatttatcgaaagctagaaatcacttgagaacagaaagcagagatcttagataatgacttcaaaggcacaaaatgttttcatgagggaaacttgtaaaggttgtggggttgttgtggataagttttataattacacagtaccatgggaccatagatgactaggcaaaattctcaaggaaagttgtagacacattttacctatgtggaactcacacagaagaaaactgtagtgatggccgggcgcggtggctcacgcctgtaatcccagcactttgggaggccgagacgggcggatcacgaggtcaggagattgagaccatcctggctaacacggtgaaacctcgtctctactaaaaatacaaaaattagccgggcatggtggcgcgcgcctgtagtcccagctacacgggaggctgaggcaggagaatggcgtgaacccgggaggcggagcttgcagtgagtcgagatcgcgccactgcactccagcctgggcgacagagcgaaactccgtctcaaaaaaaaaaaaaaaaagaaaactgtagtgatgtgtattttcattggcatcaatataaagagtctatgtaacaagaaataagaaagctttgagatcataaatcttagaacctccatttccctaactatttcataaatcgatgtgtatcagaatcttagtcatatgtgatgatcaggatgaattgtaggatcatatggcttatttttcatatttattatcccatgctataagtagcacctattttcaaggtttgaaattcttataagctactcaatttaaaaaaaatcagaaaatattcattgattttgtgtacttttgaataattgtgtatttaacaaatggtttgctaaattcttgtcatgacctgttcatgtaaataaattcttatcatgacctatttatataattgacattcattgtagtatcttttataacattctttaaaggtctgatttaaaagaaaattagtgtaatatagtgattgttaataatatagttgttggactttttctgcttaaagtataattacttcgatgttacagaatgatcaacctactaacagcaattgtttagatgagctatttgaacaattgaacaatcaagaaattcttgtaaaaaaaataggattatgaaagttgtgccaggtgtggtggctcacacctgtaatcccagcactttgggagaccaaagcaggaggatcacctgaggtcaggagttcgagaccagcctgaccaatatgatgaaatcctgtttctactaaaaatacaaaaatgagccaggtgtggtggcatgcacctgtaatcccagctactcaggaggctgagacaggagaatcgcttgaacctgggaggtggaggttgcagtgagccctgcactccagcctaggcaacaagagtgaaactccgtctcaaacaaaacaaaacaaaacaaaacaaaaccaaaaaaacaaagagaccgggcgtggtggctcacacctgtaatcccagcactttgggaggccgaggcaggcagatcatgaggtcaggagatcaagaccttcctggctaacatggtgaaaccccatctctactaaaaatacagaaaattcgctgggtgtggtggtgtgcaccttgtaatcccagctactcgggaggctgaggcagaagaatcacttgaacctaggaggcagatgttgcagtgagctgagatcgtgccactgcaccccagcctgggtgacagagcaagactccatctcaaaaaaaaaaaaaaaaaagaaagaaaagaaaagaagattgtcaactttaggacacattattattattattattattattattattattattattattattttgagtcagagtctcactctgttgcccagactggagtgcagtggcaggatctcggctcactgcaacctctggctcccaggttcaagagattctcctgcctcagcctcctgagtagctgggactgtaggcacacgccaccgatctcagctaagttttgtactgttagtagagacaggctttcaccatgtcggccaggctagtcttgaactcctgacctcaagtgatttgcctgcctaggcctcccaaagtgctgggattacaggcgtgagccaccacacccggcccaggacacattattttaaagaatctctgatgatcaaagttgttccttagtttaacgtaatctcctactcattcctcctcttctttcattgctactttactataactgtcctttgtgttgttaaaattcctatctttccaataatactgttttactttaacatcaatgaattgttttttcttagttaccttgagtcttattttgattaattttatttaaaaatatcctgtatttcatctgctctctccatcagatatggctgtttcctaagaacgatgtttatcctactttgctcattattagcttttggcatggatgggcttgacgtatttgctagcagattatctactataagtaataaaacattctggcaccacattgctatttgtgtaaaccagacaaatgttttctgtacttttttctccttacatatatttttcattcactcttgcaaacttttgctccaaatataagttaagctataaagtagttatttatatttttaaataaattattcaaagtaatcaatgctaggttttccttaatgatacacaacttcctagatgttcttaggagaaaaaactcccttgcatcacacaaagccaaaatattgctaccttgaatatcacatttcttatcccggtaagtttgggacagtttatctggctctctcaaggacatccagctagttgatcagagttcaaatactgctctgtttattttgttatacagatattccatggtaatttctcccaagcttagataaaatatttcctcaaacttttattatgatgatttcattctagggttaatgcagtgttctgaaagaataaaatcagttttgaaatgaagtatattttaatacgattctgacgtatcaattctatttcgcctgaaaaaatcagttcggggtaccatacatagagttaatcaccaaaggtattaggaagtgattactggatagattaagaacaggtgatgggatgtaggttaattagaattaagttcaaatataccttgaattaagttcaaatatactgacccatcttcctccccaacctccaactatccatggacactttgcatgtgtatatttacaaattacaaagaaattggcaaactagccccgattaaatagtgcagagaaacaagagatgaggaaaaacggcagggaagctacgaaaagaaaaaataaaataaataaaagatggcaggatagaagcagctcaggtgtgctgctctcgtagagaacagaggggctggtgaacactgactctgcaggccgatcggctgagaaaccatgctgggatcaattaaggcagcaggggacacagaaagcagggaagagtgaagctggcaccagcctgtctgggttcagcatggagccaggagaacctctccaacacaggaaactgaatgagtgacagccccttgggacactcacgctctccacagggacctgtgtaaaactgaatgagagaatcctcctggcatccccggtctccccactgcacttctagactgaggcagaaagtcaactggacatattgccgggacaactcttgattccaagggaacctctacaagccttgtgccctggagcagaccagcactggtgccatagccccagtggaggccacagttgtggtgccaacaataagattgctccacctcaccttgctagacaaggctcagtgccagctactggcccaatagtcccacttctgtccgaactcagccagtggctgcagcctcctcttgttccaggaaacacctgaatggcagagctggcaacctcaccctctgacaccggtagacaagcaggcaatgctttctagagcttccagctagcagtaccgcttttgtgtgaactcagccagagggtgcagcttcctgttgtggcgggaagcacctgcacagcaaagcaggcaactgaacccactcctgccactggtagccaggtgggcaattcctgctagagcttctggccaagtggtcctgcttctgtttgaacttggctggcaggcacagcctcctcttattgctagaaacatccggatggcagggtgggtgaatccactcacagcacactccccgccccttgtaaccaggcaagtcacacctgctagggcttccagcctcgtagtcctacttcagcctgaatttgccaagggttgcagcagcctgttgccccagaaacacccagcagcactattcacaatagcaaagatacggaatcaacctaaatgcccattaacggaagactggataaagaaaatgttgtatatgtacatcacggaatactacataaccataaaaaaggattatttcgtgtcctttacagggacatggttgaagctggaaaccatcattctctgcaaactgtcacaaggacagaaaaccaaacaccgcatgttctcactcataagtgggagttggacaattagaacacatggacacagggaggggaacatcccacactggggcctgttgggggatgggggtgctgggggagggatagcattaagagaaattcctaatgtagatgacgggttgatgggtgcagcaaaccaccatggcacatgtatacctatgtaagaaatctgcacgttgtgcacatgtaccctagaacttaaagtataaaaattaaaaaaaaatcaggatagtgagcattcccatcacctcaaacatgtgtcatttctttttggtgagaacattcaaaactttctcttttagttattttgaaatactatacaatatattattattaactataatcaccctactgtgcaatggaatgccagaacattttcctcctatttaactgtaactttgttgaccaacttctcccagtctcccccttacctcctctccttccaaacctctgataatcactattctactctctccctccatgagataaactttctgaaattccacatgagtgagacaacaaaattagcttggtgcaaagtagttgcggtttttgccattaagagtggcaaaacttttagtggcaaaaatggtaaatagttttgcaacaagctaatgtttctctttctgtggtaggcttacttcacttaacataatgtcttctaggttcatccatgtgttcagaaatgaccaaatttcattttatttggctggctagtactccattgtatatatatatataccccatttaaaaaaatccattcttgcattggtatataccacattttttttttttttttgagacagagttgagctttgttgcccagactggagtgcaacttttgcctcctgggttcaagtgattaccctgcctcagcctcccgaatagctgagattacagtcatgcaccaccactcctggctaatttttgtatttttaatagagatggggtttcaccaagctggccaggctggtctcaaactcctgacttcaagtgatccacccacctcggcctcccaaagtgctcgaattgtaggcatgagctgccatgcccagcctatactacatttttaaaaatccattaacacattgatggatgcttagattgattccatatcttcactatcatgaatattgctgcaaaatactagcaaactgagggcaatagcacatcaaaaagatcattcaccatgatctagtgggattcacctaagggatgccacaatgtttcaacagacacaaataaaacaattagatacatcacattaacaaaatgtagaaaataagtgggatcattttattagatgctaaaaaagcgtttggtaaaacccaacattcttttatgataaaacctgccaacaaactggaggtagaagactatgcctcaaaatcataaagggcatatatatcaaacccatagctagcataatactggacaaggaactattgaaagccttttctctaaaatatgcaacaagacaaggatgcccactttctccacttgtattcaaaataatactggaattactggccagagccatcaggcaagagaaagaaataaagggcatccaaattggaaaggaaaaagtcaaattagccctgttttcaaaccacatgatcttatacttaggaaaacctcaagactcaaccaaaccactgttagaagtgataagcaaattcaataaagttgtagaatacaaaatcaacatacaaaaatcagtagcatttatatatgccagcagcaaacgatctgaaaaaaattaagaagataatcccatttataatagccacaagtaatataaaatacctaggaatcaatttaaccaaagaagcaaaagcaatatacaaggaaaactataaaacactaatgaaagaaattgaagaggacacaaatcaaaagatagtccatgttcatgaattggaataattaattctgtaaaaataacaatactactcaaagcaatacacagattcaatgcaatccctatcaaaataccaagaaagttcttcaaagaaatagaaaaaaatgctaaatttatacggaaccacaaaagacctcaaatagccaaagcaattccaagcaaaaagaacaaagctagaagcaacatactacctgactttaaaatatactacaaagctatagtaaccaaataagcatggtacttgcataaaaacagatacatagatcaatagaacagaatacggaaccccaaaatgcatttacagcccactgattttcaacaggcacggaaaacacacattaaggaaaaagacagtctcttcaataaagttgctctggaaaagctgaatatccacatgtcgaagaataaaactaaacttctatctctcatcagttgcaaaatcagctgaaaatgaattgaagacctcaaagtaggaccaaaactgctagagaaaaacagggggaaagctccatgacattggtttaggcaatgtttgtttgtttgttttttatataaccccaaaaaacataggcaacaaatatagacaaatgagattacttcaaactacaaagcttctggacagtaaaggaaataagcaagagtgaagacacaacttacagaacaggataaactatttgcaatctgtacaactctctaggggttaatatacagcatatataagcaactcaaataacataatagcaaaataacaaataattaataattaaaatatgggcagaatatctgaatagacatttctcaaaagaagacatacaaatgggccaggtgtagtggttcacgcctgtaaccccagcactttgggaggctgaggcaggtggatcatgaggtcaggagtttgagaccagcctggccaatatggtgaaaccccatctctactaaaaattaaaaagccaggcgtggtggtgggtgcctataacctcagctacttgggaggctgagacaggagaattgcttgaacccgggaggcagaggtagcagtgagcccagatcatgccattgcatttcagcctgggcgacagagtaagacttcaactcaaaaaaaaaaaaaaaaaaagacatacaaatgacaaacaagtatattaaaaatggtcaacataactaaatgatatggtttggctgtgtccccacccaaatttcatcttgaactgtagttctgataatccccacatgtttgggagggacttggtgggaagtaattgagtcatgaaggcagttacctccatgctcttctgttgacagtgagtgagttcttatgagatctcatagttttataggggctttttccctccttcattctgcacttgtctcttgcttgttgccatgtaagatgtggctttgctcttcctttgtcttctgcaatgatcgtgaggcctccctagccttgttaaagtgtgagttcgttaagcctctttttttcataaattagctaatgtagagtaggtctttagtagcagcatgagaacagactagtacactaatcatcagagatatgtaaatcaaaaccacaatgagatatcacttcacccctgttagaatgtctgttttcaaaaagataaaaaggaaatgctggtgaggatgtggagaatgagaattcttatacactcttggtgagaatgtaaattagtacagccattataaacagtagtataaaggttcttcaaaaaattaaaaatataaataccatatgatccagtaataccaataaacgtatatccaaaggaaattaaatcagtatgttgaagaggtatctacatttctatgtttattgaaactgttttattaataaagtcaccacagtgatctacatacatttggttttctgagaatgtgttgagaatactggttatgcatcaaacaaatggattatgacattgtgtctaattgatgttacaaatcaatacaatttactaaagaagagtcactaagaatgcagactctggagtgagatttctttagtttatagctaaatatatttaatatccatgagctttgggaacatgggctaactaaggaaactttcttcacatttcttctacctttaaagtggaaataattataagatattcctcatggggctgttataatgaccgaatctgacaatagatgaaacacactataaagatgcataccatattttgaaaaatcagtaaattttaatcatttccttttatttagttggattttttaaaatagaaatattctaagcacagagtgtatgaaacttgaatttattactctatggcctatcatggaaacagtgttgttatatgatacatttatataattttaaatatcatatcatactgtggtcctactctaatattcaaatctcataaactatcatttttgtagttgtttcacatttttaatttagaaacatcaaggactattgctttgatgagctattatatattgcttttctgttaggcttagtaagcaaatataatacttcagtaaaaataatgataaactatttctttcaatgatttgaaagttgcctgatattttgagataaagtctagtatatctttttttgaaacagacaaactgggtcttaaaataaatcagaacaattatgctgtttatattggtgagttacatgaatccacttagtaaataatgaacagatgttctactaatcaaactatacagacacaatttgcttttctgacctaaaggccatacccaagaaaagctgttgctcattttgttctttcacttgggaaaaggaagggagaaatttaatatttctcaaatgaattgtgatcttattccaggagcttttgaaaatgtagcattatatacaatatagaatttctatataaaatacagaatatgacaattcacaaaaacccaccttgcacatattcaatcgtatctaatgcatatagtatgctgtgagatggtgatcttaagtttatttcatagatagagaggaacccagagttgaagttacatgtcaaggtggtacatgtgtcttctgacttcagaaccactagtgtgtgttctcccaacaagcaggaaaacagaaagtgccttcctattctcttttttaaattgtgtaacttaaggattaacattcctgagtttaatatccaatgctattacttactggttatgtaactttggttagaatattgaacttttatgttcctctgtaagatgggatactaattgaacctccttctgtaggcatttgtgactgcctatgagctaaatcatgtacagtgtttagacgagaccccagtacaattagcagtcagtacctaccacatcttattattatcatttcctttttgaaaccaaactgtcaaaattgtgagtatcttggcaatggaaaattttcagctcttcacagtcatccttgaatcactctcagaccatttcactagggcctaatgggaaatgttctttttctgaggtgactcagtaaactcatgaatctttccctcaaacacacacacacacacacgcacacacacacacacacacacacctatataaaatggaagaatagcctttcaattagaaaacacataaaaaagaagatacaaagaaaatatatgtagcacttatgagattaagcccagtttttcattaaaacatctgctcttcaagtttccatcccttggctctcacttaagtattttattttcaacttatggaagcaattacttgaatgcaaactccagggaagtaaatggccgcagcatatagctcattcaatgtacatttttgcattatcttatatacaaggcaaattagttttcaggttagtaaaaataatcttaacttcatatttttattgcttgtgggaattattccagatgaagtagcatgcaaatttcattgttttacatgttttttttttctagcatatatttcatctggggttgcataatggaaagatctatttttttctaaaaccttttgtcgtagtttgaaaggatcaacggctcctccctgtgattcagtttcacatggcgatttcctatgagccctgaaaacgtggaacctcaatgcatttgtttctgcttaagaattataaatcttcttactctattctgtgattataccatcccttgacaatggttttgctaaaagattttcaaaagccgagttctgggagtagaaggaggttcaactttgaatgctattttctgatcaattggagcttcttaatcctcttcctttactggactgtgctctggtaaatagctgtcagcaagggaaggagttcaatacctgtgggccatgacccacttaaaggcttcttcttttgggaaaaaaatccaagacagccttaaatgtcagtattcttctggaatgcccttgtgtcagcttcaggggttcaattgccatgcgtatctataaattccagccttttcaaataaaatactggaagttattacatctgtcaggtgaagcagaggtaaatgcaagccttgaatataaagatttgattcatatatacaccgtcaacaataagaaagccagagaggccttctagtatttggacatacatgatacattcttcagttgtgtatgatattcattaaaaattcgctgattattcttatcctacccattttaagataatccacaattaatcactggccaagcattacaatgcaatgttctatcaaatttatgcaaaagattctcttttttttttaaaatacactgaatcctccttttttatttcagatgtggtgttttgttaaggattttattgtaatacagttcttcagttccctgaaagtttagatatatgtaaaaactcatttcttaataaaaagcccatcataaacatgaaaagggtaaaatgacataatgtgacaaatgttgctattagcttatctgttgttatggaattatttttactgtacacagttcaccaaaaaataaaaaactgtcaaaaagctactgaactaaatgtctgtttttattttagtgaattgatcatagatttgtctgcccttttttttttgagttgttaatcaaatataaaaaccagtcacgattttgtgcaaaactacaaatacatgcagttttaaaatgtagagacactgaaaataaaagccaatttacttctcaggagggataaatcttggtttcagcaacaagaagcattgaggtgtttaagctgctttggggacagcattatagaagggcagaagagccctgtgtgcttacatgagctctggtttgtctttctctctacaattttctgcaattacaaaatatattttgagaagagcttatgcttttttggacagctaacatgtttcacttgttattaaatttactttttctctcttctactctgttttctatactttcctggtggaaaaggttcagtttttgtatgactgtccaagatgaaaacagaagatactacacatttttgactcagtgagtttagagccaaagatgattgtcaatcaatgtcaaagttcacagtcatggcatgcataagacatgcatgacatgcatgcataattttatgcatgcataattttatgtatgcaaatgcaaacttatgcatgcataattttattttctcattgtgattcttgcttccagttgatgtggttcaattcaaaaaaagattcattatgattttactcgagatcaatagctacatccgaattttttggaaatcaatgcaggactgagaaactactttccacattgtgttcttggggagatattagctagtggcaggtgagcttatgtttatgtgatggcacctgcgagtacatagaggttggatatgttagtaacatatttaaggcatactcaaaacttagggattccttgagtctataatttcataagcatggtttgttaaaattagcaccacaaaggtttaaggaataaaaacaactttctcaagttattttttacttataactcaatgtatacacacacataagcaaacacacaaagcaaacataatgtaatattaaaattaggctgggtatggcagctcacgcctgtaatcccagcactttgggaggccgaggtgggctgacatattcagcccaacagctctagaccagcctacgcaacatggcgaaaccatgtctctacaaaaaataaaaaaataatatccgggcatggtggtgggcacctgtggtcccagctacttgagaggctgaggtgggagaatcaccggagccctggatgggatgttgaggctgaagtgagctgtgacagcatcagtacactccagcctgtctcaagaaaaacaaagagattcaatacaatattttgaactggaatgttacaaactgaataggaatatggataaagatgaactaatcgatgacaatttcaatatgagccaatagaaatcatttatttaacagctttattgagttacaattaatatagaaaaactgcacatatttaatgtgtgcaatttgatgagtttggacgaaggtaaatatctgtggtaacattatcaaaaccaaggtaataggcatatccaacatctctcaaaatttccttgtgtcccttttattgtttttgtagtatgaacgtgcaacataagatctaccatcttaacaaagtttgaagtgcacaatactgcattttaactataaggactgttatacagcatatttctagagcttactcatctagcacaactgaaactttatatcttttgaacaactgccacagtttataaacaaccccacatttttaattttgcaatgtcacatgtcaatccctttaaaagatttttttgtattgatgtgtcagttttgttgtcttccctctaagttgaaaactaccagcctctaatttaaatccaggcatctggatctctcaaaaatctcacaaaataaatctgattatatttccatgaaggccctccagatactcataaacacgtgtcatgctctccaccccatatctctgcttttctaatgtattagtcagtgttctccagagaaacagaaccaatagaatgtgtgtatgtgtgcacatgcatgcacatgtgcatatacgcacatatatacagaaacatatttattttaaggcttgcctgattatggaagctggcaaatacaaaatctgcagggtacactggcagcctggagagtcaatgatgcagttcacatctaaaggccatcaagactggagatttagagacgagcttattttgcagtttatgcagctccctcaaaaaattaaaaatagaactactgtatgattcagcaatcccacttttaggtaaatacccaaaagaattggaattcagatctctaagagatatctgcactcctatattcattgcaacattattcacaatggctaagatatggaaacaatccaagggtccatcacagtgaatgaataaagaaaatctggtatatatgtgtataatatgagtaagactcaaaagagaaggaaatcctgccatttgagacaacatggattaacttgaaggacataatgctaaatgaaattagccaatcacagaaggacaaattctgcaatattccacctgtatgaagtatctgtaagagttaaactcatgggagcaaagcatatgatatttgccaggggctaagggtaacaagcaaattcatagttatttttactttgatttattgagatctagttgtcaaaggacaatatgtgagtattggaaattaaatactagaaaatttaaactttaattttacaacaatggagacaatatcatataagaaactcaatttataaagctccacagaggatactcatgcttgtaatataacctctaatttgaaatgtagacattttgaaaatgcttttgtagaaaaattgcctagatgttgaatgcatcatttcttccttgctaatgtgatattcttttgtacactgatgcgatgtttccttccataaggattccaactaagttcttcaaatagaaagaagtattttcttttgccccgaagccattttaatatgtgtattagttagggttctgcagagaagcagaaccaataggatatatatagagatatataaaaggagattcattatgaaattggttcaagcaaatacaaaggctgagaagtcccgtgatatgccagtgagcaaactggagaaccaggaaagccagtggtataattcattctgagtacaaaggctcagaacaggaggagccaacggtgtaactcttagtcccagtacaaagccaagagtctgagaggggaggggctgctggtataagtgccagagtctaaaggctggaggatcacaagctccaacgtccaagagcagaagatggagaaaatgaatttgcccttcctctgcctttttgtgctatcttgggcctcacagattggataatgcctgttctcattggtaagggcagatcttctttactcaatctactgattcaaaagctaatctattccagaaacatcctcacagacacatcccaaaataatattgtattagctatctggtgttccttagccaagtcaagttgacacacaaatttaactatcacagtatgtgatatagcttggctgtgtccccacccaaatctcatcttgaattgtgggtcccataatccccatgtgtcatgggtgggacccagtgggaagtaactgaatcatgggggcagttaccctcatgctattcttgtgatagtgagtgagttcacacgagatctgatggttttataagggtttttttccttccttcactcctgccaccatgtgaagaaggacctgtttgcttccccttccaccatgattgtaagtttcatgaggcttccccagccatgtgggactattagtcaattaaacctctttcctttataaactaccctgtcttgggtatgtttttattagtagcatgagaatggactaatacagtgtgaaaatacatagcttttcttaggggcataggagatagacaaattttaatgttctgataaagctctgttattgtcaatgaaatgacataatcatagtcctttatggaaagccattacacaggttctaggtattttttcatcaacattagagttacatgaaaaacatatctgcagttaggaaatatttaggctgatgaagttaggacctgtacttgcaagaaatatcagggcttcagtttctaaattcctattaataagctctctagatgtgggaattatatatttatcaaattttacttttgaacattagctctttgcagaggttttgaactttgctctttgcaaggaaaatgtctacttacccttcattcctgttgtcagggaggagaagacccccttgagttcctcagcaaagaaatctagttttaggttagctatcaacagtgacaatcagtgagtttgggggaaatatgtgtaataattaactccctaaaactattttagaagagaagggataaaaagtaattgtaactaattttaacaattgcgaggatgaaaccaaatccaaaaggaaataggagtgaaaatgtccctccttgcatagtattgtatagcaatctagataacatttgatttggtttcctcagaataattaaattctggcaccttgtaggttactaagatgactaaaccaatgctcttgcaaatgatttaaagtaaaataaattccgtgagtaaaattatatgaatctaattaacatgggaagtaaatcctttaattagaaaagtcaaataattatttttcttcaaagaaatgaaattactgcaattactttttgaacagataatacagaattatttaatagataattttaaggtgcccacaaggcaggaatttaagtagtgagtaaaatatttacaggggattcagggattaactttctcctttaggagattccttagaacttcagccttcatttacaaatcctaaaatagaatgattgtctaatgtcagcgtttcactgaacaactacataggcaaatttatttttatctaagaagtgaaataattactcgcataggttcttaagttactgattaaaatgatgttatttataattcatgttaattaaacacatacacacaaagcccacttattttgccagttacatttctcaatattcaggacatttcaattgaactacaagttttagagggaatttgagactagacctgaagagggctacctagtttcctaaattccagtaagatacttaaaccactaaattaagataatctaaaaatagcacaaggaaacagtacaaatgttaagcaagactcttactatgaagctagttagaattgttaattagagctgtatattattcattaatgtaaatcacatataaataatttaatacatacgtagtgctactactgattataaaagtaatcaaagcatacacttggaataaatgtattatccttgatacatatgttcaaactcaataaagattttcagaaatttatatcttccttttacaaagttatgagtaattatttcaaatgacaggtaactttctttttaggtaagatacactgttctagaaaataagatgtagaaagagcctgaatgcagcagtcaatacccaaatttaaattttcaatagtgaattccaaaacatttaggcaatagaatgttaggtttaaaaaagtggactctgttattagacagagagacatttgaatttgttctttgccccttactatgtgaccttcagtaaagtacttgacctatctaagcctcaatttcctattgtgaaatgcatagtaattgtaacaatttggtagattgttgaaataattgaaataattatatgtaacttgctcagcatagtgcttaccgagtatcttaacatatgtggtctgttattatcatagtaatttttcatacagagttagacacgaaaaatgaaagacagcatgtgaatggtgtcagtcttaaaatatttgaggctttcatatttaattaggccagaaaaaatattggagacacgtacgtttctcacctaccccaacttccttgggagaaatgaagttgtgctaaacctctttataaaggaaaagcaacttattacgttggaatgggtgctgatggggacttgtcattaaaaaccctagatagtatgctatgtacaggagatcacttaagtttcaatgtgtgattatctttccaggaagtttaggaatgcaaagcgatgtataatgtttgatttgtgaaagtaacaatcttatagtagttattaataatgcaatagagtttaaaatcctgtagcaaaaaattttgtttctgcaagaagataaagcagttgggctaataagaaatgggctcccacttctaataggaagtccttgatttcagcaagaaggcaacaacctaagccttctacttctaggggatatttgttggtaagaaggaggtgacgatttctaaaaaccactaaaaatggccgaatccttatcaatagatggacacataattgacataatctacttttgttgtttaaattctgtggcctgagcacttagataacttttgaataaccaactgattttgggagcccagaaacttttgagtataattctagaaaaatgaacatcatctccatccgttgttataccctttagtaagaaagatccttattcagactgagcgtatactgcattgagacgaagcccaggaggttagtgtaagtgtgcttggtgctaccatttccttctttgtccactaatcagaaataaaatgacataatttttgatagccttatattaaggtataaggaggattgaggttaaggcgttcttcacatttattttgtcatttagctaactcagacgccatctggaaggagctgttggaaccttgtgcatgaatgaaaaaaataattggggaattagggagctcaagcattctttggtaagtcacaaagtggtatatttgggaaggcatgacaaagcttacttttggcatctatcttcagggtgggaaattttcgttcttttagactatattcagtcagtttagtcaatttactcatattgaatgcacactatgccagaactgtgttaggtctttgaggtttcaagaatctcaagtggttctcaaatagatgaaattcagcaatggttgctggatatcttttaatcaaaggcagaagtagaactccagaggagttacggttgttttcacaaagtggtcggacaaagtgtttccattcatgaaatttctgacacggggtagctgctagacttgtgagagatgagcctgtcactaacaatagaaaatattagaattaacattttactgcaaaaactatgtatttcacagccacagaatggattaagcgttagttctaacaatgtctccataacacccatagaagagaatctcaaccctaacagacccatggtacttttcccaaaataaaattcctggttggagaacacatgcagactgctatacagctgccaaaaataccatgagcaactatttcttttgatcatgtgagttttctaaagtgaaaaatatatcttatgatgattatatcattttaattttcatgaaataaaatttatcttttttattttgttgttatttattatttgtcttgtttctttgatagtaaagatactctcgttagctttcttctaggaccttcatagtctagcatttacgtttaagtcaatgatgtgtctttgattgtgcttttgtatatgtatatggtgtgcataggtatataaagtgtacaaggtcaagtttagttttattccatgtggatattcatttactccagcattatggttgcaataaattttcccccagttaatttgatgcatttataaaaatcaacttatcttataagggtgcatccatttctgaactctttaatctgttccagttatcaacaggtctactcttttttttttttctttttcttttgagacagagtcttgctctgtcgcccagtctggagtgcagtggcactatcttggctcattgcaacctctgcctcccaagttcaagcgattctcatgactcagcctctcgagtagctgggactgcagaggcgcaccatcatgcctggctaatttttgtatttttagtagagagagggtttcaccatgttggccaggctagtctcgaactcctggcctcaagtgatccacctgcctcatcctcccaaagtgctgggattacaggcaaatgtgtctactcttaagtcaatatctcatgtcctggttactgtttctttaaagcaaatgcatatgtctaataattaaaatgctgcaaatgtgttgatttattttcataatttttggtcttattctagaatgtttacctttcatataaattttacaattgacttgtcaaagtatgctggtattttcatgggaattgttttaaatatatcaataaatctaagaagaactattgattcttcagacttgttacttctctgcgaacatgatacatctctccatttattttgattatctaaaattggctcagagaagttttgtaattttcagtgtaaaggtctcacacataattaattaaatttatttctaggaatgttgtttgatgctataatacatgaatttttaaaaaccagtagtttattaatagcttataataatactatcgatttttatattttgatattttattctgtgatgtttaaatattactcattatgtaggtagtttcttggtaatttcttttttatatgtagattatcatgttctctgagagagatataattttgccactttcctgtatttatggcttatatacatttttctgcctcattgcattggattgaacctctagagcaatatggaaaatgagttgtcagagaaaatattctcagtgttaatgagaatgagttcaatatttcaccattaaatgtagtcttagcagtaggtttttttttggataccattttcttctattctatctgttgctcataagttttattctgaattattaaatttagtcattttttctttctcgagtggaacacaagacttttctttctctttctatgtagtacattcagcagttcattgaataaactcctatgatagtacccttaatattttacctaagttattcaattatttatctgtactgtgcagtaatcagagttctgcaaataaacagaaacaatagagtgtttgtgtctgtagaaagagatttgttttaaagaattggctcacccgattgtggaggctagcaaatgcaaactctgcagggtgggctggcaggtgggagacccagaggagagttcatgctgcagttcaaaggcaaagactacctgctgtagaattcctctcactcatgtgagatctatctattgttctattcagtcaccttcaactgattggatgagactcatccacataatgaaggacccaatgctttactcaaagttcactgagtaaatgttaatctcatctaaaaacacagaaacatccatgataatctttgaccacacatctgggcactgttgacacctaaaattaaccatcacatgttattgctatttccttcaatggctgtgcattcaccatgttttacactttaattatatactatttttatttgatagttcaccttgaaatcagcctgatttccccatagaactgatgtttatggttttccttgaatgaacatagaaatttaccttccttgtcttagagcttgaaaaaattacatttgtcttatcttagttcctttctcagcaaatcgaccatcaggtttcctgacagtatcaaggaactgaaacttaccagatcagtgcatctggccaatgagacgtaagatctccatccatcacgattgcctaacagaccacctgctacccattgaccaactcctctttcgtacacttccttaatttctgtttttctacatgtagttacatttcttccctgctctataaacccttaattttagtcacttgaagaaatggatttgagattaatcttccattctccttgactgtagcactcacataaagccttctttcctggaaatactcattgtctcagtgattggctttctgtgtggtgagcaaaatccctagtgtttcagtaacaacttaataaagcaggatttaaaaaaaaaataaatgcactgtatgaatcttgtagcatgaatagcaaggaattaagaaaaactaaactccccacgcatatcctttttcaggaagggaaaatcaatatcttacagtacagttttcattctaagaaatactacacattttatgttataagcaaaattttatggaatagtttatgaaataaaattgaacctcacagttttaaatttctttgtacaataatgtttcctttagacacttccccatcctccttttaattatatagtaaaactatataatttttgtcataacttaaagtcgatttattttcagtgccttttaaaagttatcaacgatctttggatactatagttgccctgagttcaacttcatgttttataaaataggcacaatcttcctttatgggaggaggagtttctttctatgtctttggttatcagaattagaaaaactgccttgatcagcatatattaaattttttaaagttaagtttttcatcacttgtgagactaattttattgtattcttcacgtgatgatgattatgatgtgacttcaatttacccttcctaatgtgattgtaaattttcatgtaatgaaagaagaggcacaaccaagattactgcacagcattggtaacatgtagaaaatatatttcatattttgagaagagacaaactcttagctctcaaggtcacagaatgctgacagttaattggtcttttgagaaataaaatcttgaaagaagactaaaaattgcattcaagtattactcaagattgtgtataatagcaatatgaaaacacaatgtggtaaattataattaattataattgtttgtttctacaaatcgttgctacatacaagaaagtgtgatgtagactagtaatttatgcttggaattgctgtttttttaactacctgtccaataaaggtttacttcaggagggtatattacacctagaagaaaatttatttaattagataaatcactattagacataatcaagcaaatattgagtttgtaaatggccatatataaggaaagaacaccattatatttgaataacattgttaaaataaaataaaataaaacttttgaaacatttaagcagactttattaaaagtatttttaagatattgagaatttgaacatggcctatgaaaaataaaaagcagaagtgcaagcaagaaaaacagttgtacaagtggctttcaaaaaaaaattgcttgcctaaagagtttggtttgtagagcatcaagaaaatcacgcatttaagattcaccaaggttgaaatgaaggaaaaaaaaattttaagggcagccagagagaaaggtcaggttacccacaaagggaagcccatcagactaacaatggatctctcagcagaaactctataagccagagagagtgagggccaatattcaacattctgaaagaaaagaattttcaatccagaatttcatatccacccaaactgagcttcataagagaaggagaaataaaatcctttacagacaagcaaatgctgagagactttgtcaaatctctcacataattttttaacatatttagcataattaatttaacaatattaaacttacatgtaaatgggctaattgcctcaattaaaagacacagacgggcaatttggacaaagagtcaagacccatcggggtgctgtattcaggagacccatttcacgtgcaaaaacacgcataggctcaaaataaagggatggaggaatatttaccaagcaaatggaaagcaaaaaaaaaaaaaaaaaaaaaaaaaaaaaaagccgggggtggggagggttgcaatcctagtctctgataaaacagattttaaactaacaaagatcaaaaaagacaaagaagggcattacctcatggtaaagggatcaatgcatcaagtagagctaactatcctaactatatatacacccaatataggagcacccagattcataaagcaagttctcagagacctacaagagacctagactcccacacaataatagtgggagactttaacaccccactgtcgctattagagagatcgagacagaaaattaacaaggatattcaggacttgaactcagctcaggacctagcagacctaatagacatctacagaactctccaccccaaatcaacaaaatatacattcctctcagcaccacatcacacttattctaaaatcaaccacataattggaagtaaaacactcctcagcaaatgcaaaagaatggaagtcatgacaaattgtctctcatactacagtgcaatcaaattagaactcaggattaagaaactcattcaaaaccacacaactacatgaaaactgaacaacctgctcctgaatgactactgcataaataacgaaaataaggcagaaataaagaagttctttggccaggcgtggtggctcacggctgtaatcccagcacttggggaagccgaggtgggtggatcacgaggtcaggagatggagaccatcctggcaaacacagtgaaaccctgtcactactaaaaatacaaaaaattagctgggcatgtggtgggcgcctgtagtcccagctacttgggaggctgagacaggagaatggcatgaacccgggaggcagagcttgcagtgagctgagatcgtgccactgaactccagcctgggtgacagagtgagactccgtctcaaaaaaaaaaaaaaaaaaaaaaaaagttctttgaaacccatgagaacaaagacacaatgtaccagaatctctgggacacagctataccagtgtttagagagaaatttatagcactaaatgcccagaggagaaagtgggaaagatctaaaatcgacaccctaacatcacaattaaaagaactagagaagcaagagcaaacgtatttaaaagctagcagaagacaaaaaataactaagatcagagcagaattgaaggagatagagacacgagaaacccttcaaaaaaatcaatgaatccaggagctggttttttgaaaagtttaacaaaatagatagactgctagtcagattaataaagaagagagagaagaatcaaataaacacaataaaatatgataaaggggatatcaccaccaaccccatagaaatacaaactaccatcagagaatagtataaacatctctatgcaaataaactagaaaatctggaaaaaatggataaattcctggacacatacacccctgcaagactaaaccaggaagaagtcaaatccctgaatagaccaataacaatttctgaaattgaggcagtaattaatagcctaccaaccaaaaaaagcccaggaccagatggattcacagccaatttctaccagaggtacaaagaggagctggtaccattccttctgaaactcttacaaacaatagaaaaagaggcactcctccctaactcatttcttgaggccagcatcatccttttaccaaaacctggcagagacacaagaaaagaagaaaattttaggccaatatccctgatgaacatcgatgtgaaaatcctcaataaaatacaggcaaaacgaatacagcagcacatcaaaaagcttatccaccatgatcaattcggcttcatccctgggatgcaaggctggttcaacatacacaaatcaataaatgtaatccatcacataaacagaaccaatgacaaaaaccacatgattatctcaatagatgcagaaaaggccttgaataaaattcaacaccccttcatgcaaaaaactctcaataaactagatactgatggaacgtatctcaaaataataagagctatttatgacaaacccacagccaatatcatacagagtgggaaaaagctggaagtattccctttgaaaaccggcacaagacagggatgccctctctcaccactcctattcaacacagtgttagaagttcttgccagggaaatcaggcaagagaaaggaataaagggtattcaaataggaagagaggaagtcaaattgtctctgtttgcagatgaaatcattgtgtatttagaaaaccccattgtctcggcctaaaatctccttaagctgataagcaacttcagcaaagtctcaggatacaaaatctatgtgcaaaaatcacaggcattcctataaacaaataacagacaaacagagagccaaatcatgagtgaactcccattcacaattgttacaaagaaaataaagtacctaggaatacaacttaaaagggatgtgaagaacgtcttcaaggagaactacaaaccactgcttaaggaaataagagaggacacaaacaaatggaaaagccttctatgctcatggataggaagaatcaatatggtgaaaatggccatactgcccaaagtaatttatacatgcaatgctattcccatcaagacacccttcactttcttcacagaattagaaaaaactattttaaatttcatatggaaccaaaaaagagcacatatagccaagacaatcctaagcgaaaagaacaaagctggaggcatcacactaactgacttcaaactatactacaaggctacagtaaccaaaatagcatggtactggtaccaaaacagatatatagaccaatggaacaggaaataagcctcagaaataacgtcacatatctacaaccatctgatctttgaaaaatctgacaaaaacaagcaacgaggaaaggattccctatttaataaatggtgttgggaaaactggctagccatatgcagaaaagtgaaactggatcccttccttacaccttatacaaaaattaactcaagatggattaaagacttaaatgtaagacctaaagccaaaaaacccctagaagaaaacctaggcattaccattcaggacataggcatgggcaaacacttcatgactaaaacaccaaaagcaatggaaacaaaagccaaaatggacaaatgggatctaattaaactaaacagcttctgcacagcaaaaaaaaaactaccgtcagactaaacaggcaacctacagaatgggagaaaatttttgcaatctatccatctaacaaagggctaatatctagaatctacaaggaactttaacaaatatacaagaaaaaaacaaccccatcaaaaagtgggcaaaggatatgaacagacacttctcaaaagaagacatttatgtggctcacaaacatatgaaaaaaagctcaacaacactggtcactagagaaatgcaaatcaaaaccacaatgagatatcatctcacaccagttagaatggtgatcattaaagtcaggaaacaacagatgctggagaggatgtggagaaacaggaatgcttgtacacagttggtgagagtgtaaattagttcaaccattgtggaagacagtctggagattcctctaggatctagaaccagaaataccatttgacccagcaatcacattactgggtatatacccaaaggattataaatcattctactataaagacacatgcacatgtatgtttattgcagcactgttcacaatagcaaagacttggaaccaacccaaatgcccatcaatgatagactggataaagaaaatgtggcacatatacaccatggaatactatgcagccataaaaaaggatgcgttcatgtcctttgcagggacatggatgaagctggaaaccatcattctcagcaaactaacacaggaacagaaaaccaaacactgcatgttctcactcataagtgggagctgaacaataagaacacttggacatggaggggaacatcacacgccagggcctgtcgatgggtaggaggctgggggagggatagcattaggagaaatacctaatgtagatgatgggttgatggtgcagcaaaccaccatggcatgtgtatacctatgtaacaaacctgcacgttctgcacatgtatcccagaatgaaaagtataataataataataataataataaactaagttcctacttgcctatcatggagctataatttgaggacaagaatgcattcttttgagtaataagtcttgataaatccaatactgagaagaaaatagcagatagagtggtttacctttgattattttgttacaaaatacctaacataccagagtttaaaaaattgtctgacttggaaaaatgttttagggaagagatgaaaagggaagaaataaagtagaattcctaaatctaaaatatacagattcaatcagtgggggaaaattgtgtgtctgtgtaaagaggaaggtggggcccaatcaggagctagaaccagggacctaagacttttgttgtgggaatgataatatgataaagatattttataatattgtcctatggatgctaccaataaacgaatctaagaagttagtggagtgaaaataaacgggagattatggttgcatgacctgagagaaactgaaagtatgtcaaaaagtgtatttgtgtagttttagttttagttttttaaaacagaagagaaaaagaaagacaagagaggagagacagagagacagtggaggtaaagagaaagagaacttttgaaagttccacaaaaagttgaaaagaccatatttacataaaaattacaaaattataggatatatagttggttatttaaactctacagatttctatattcaaaaggattacaacttttgaggtcttatgtttgtttttagatccttagagatttggaaggcttacaatgactattgaccatccctatttcaacccactcatttttggacaagaaacagagaggctccttttgtgatatcagtgaatgatttaacctcagtgctatagcttttcctctgttctcccactacagcatcacactggcaaaatagacaactgctttatttcaattatggtgacacagccaattcaggttggtataatattgatatacaattgcaggttactgaagaagatacttctcttgtttattcattatctataatgtctttcactggctcagcctccttagacctctctggagactaatttctggtgcataaacagaagagagaaatccaggaaagcattcagtttttcaaacaaaaaaaaaatcaacaaaaagttttgcctttttttatttgcttcatcaattatttctacaaacttttattatatacatttagaagtctcatatttgatttacaaattgagaaatgaaccacagcttcaaaaacataatacaagaaaagcttcaaaggagaataattgttttctttacccacacccaatgtttcatttatttcatttagcaataaacgagtaattgtactttgggtatacactttgtcccctgccttttaatttaccctctatcatacctccaggtggtaccatatgtaattctactttgacggtgcaagctgcaccctgttaggtttcaaaaatatgttctggtaataactttcagtttagaaaagcaaaacaaaatgtggagtacgcaggcgtagtcataagttacgacttcctctgaatgaaagaaatcattctggtgctaataaaatttgcatgtatataaagtagaaaatcacatgctttaacataaataccggaggaaaaagcaattgcagctggctgttgaaagccttggctcttatgtccacccggctaatatatgcagccctaactacagctgcactgccagcagttttcctttatttttcaattacagtttggaggcaggaagagggcatgtatattatagaattcttttggatgtaaataaatgtttgtaataaaagaaggagatcacttccttcttaagtgcttgaatgcctaaatttaggctttgggctttacaaagttatggtttatagttccttatctaaatttaattatgcaatctgatgtgttccattttagaattttcctgaggttctgtttattgcccttggccttcaggcaacatttttttgtcacaaaagaattacctaaattattaatatgctctgttttttaggatataaaaatattaaattttacatttagcttttgaaaatgattgggacaattctagaagctttgtagtaaatcatcagataattcccctctggtttatattgccttgctcctcatataagctattattataatattcattacaattgttcaaactttgatttaaatcaggaagaaagtatacaatacaagagccacatatcatgatagattttagtggggagttaatataattaaggagcaaagttattttggggatcctcctgtaaactgatttgtaattttgtggggaagacaaacaaatatgcagtaagtaattcaccctatttctgttggccataaaaataactgtctcgttattgtagcctatctctgcaaatagtcttgtgtctttattaaatagttttgtacctatattaaagttaaaaatagctctatctttttccatgtttccaataagtaaatgattctgaattttctcaattaccttgaaagcagaaatagtaatagaatcattgttaacctttggtaaatttcataaattgtcctaaatatattttgcattgttatttacttgggtctaaaacaaaggaaagatagcctagtttttttggtaaattttctggtgaacaaatctactagagtcatgaatactatagagtcaggaatactggagcaagtcaggattactttgagaatagcctttgctctcttttaatgaaggtgttactaaggccttgacatcaagaaatctctgtcatctctctccaacttttctttgggccttcacatcttccttagttaacttttttcttgcatactattccattccatgtacttgaccctcctatattccttatcaatacagaaaacaaaaaaaaaagtatgctttttaggagcctccctgtccttgcaaactgtcaagaatattgcacaaagtgtctatgaactacaaatttctatacaattatactgtatacctaggtctagatgacacgaagaactcttaccccaaccgaaaataaatgaattctaagcaaatgctgagttatttctccctctgatactctgggtgatggttaagtgtgtataaaagaagcagtatatctgaaagttttaaaatttatttttcaaaattatgttgtcaaggtctgcccagagatttcatgtatatctcagttgagttgcacagactctttattctcctttgttgttttctttcctctgttgttgcaattatcaatagataaacttcattttactttgccattagaacgagaggaaaggaaatatgaaaaaatgggagatagagaaggcatatgatcttattctgaatattccacatttcagaaaacaagagagcctcaaaatatagtataaaaaactttaaatttatacaatgaaggttttccatggagatattttcctctttgtggaaaaaagtatccatagaatgattctctggggaaccgatttttgtatctttaaaaagattagtctagaaatagaaaaatcacaagatacgtaaaaattaggataatttttttcaatacttcttacatctctattacccatgatagttgatatatgaaagatgtcactgaaacaccattttatactgtgaaacaaaactccaaagtgaactgtcagagataggactcattttttcttgccaaaggcagaaatttggggtttcaacagaactgtattaaggttgcaagatgtctctaaaaggaaattaagctggttttgataataacaacaacaacaaaaacaaaaagaatgtcctatttgcagatttgtaatttcatatctatgattttttctatcaatagtatgtatatatgttgctatagtgttagatgcattattgttcccctacttagccatcactctcttggttatcttagctgttgtgtttagtatatagaactttttacagccaaatacaagttaatggtctaaatctgtaactatttattgttgtaattcctggagggattgctgtcttcttaatctttcagttttgaaaaaaaaaaacagcataatatggtgtttttcctggttcctaaagcctaagtaatgtttgctcaagctgacaaacctgcagtgcagaaataaggatacctcaaagaataagtatgtgggatagacacggtgtcttacacaatcctataaataatccatatttttgaaaacttaatgataatttttatagaaacctttgcaaccagccactcaaatggcaaaatcacttggagtgtgaaaattctgcatgcccataccataggcaaaatcaatgcaaaaagttgtctgctcctgtagatctttgcttcctttctctgccagttagaaactaagaaatggttttatagcttggccacagatgagggcaaaaaaaaggcaggagaattcaccacagccaataacatgaagggaatcagcgaatcagcactcactgtggttggcctgatgaggtgagggtgaagagcaagagagtgtggacatgcctttttgtgtaacagttggctgaagcaaactgattaaatggaaagtaaaaggaaaatcatagggagagacagaataatccatttttttctcaagatgaaatggcttcagtcagaagttgctttagaagaagatctcattacgtaaataacaaaatcaagatggaaagtttaggttatataaacattaagaaataattgttgcatcagaaaaacatacacctttaagaaggattacctgtgattttattttcatatcactaaaaagaaatttttttttgttctatgagaaaagaggctggaggtagaagtaataaataagtctcatagtgtgcatgtcataccttaaccaaactagcctgaaattaaataaacgtatgttctaaaaatgaacttctcccttttagcctatggggttcaattcaggtagccaattatttgagtgatatttctaaaaatacaggatacatagtaagggtgcaaatttaaagctaaaagaattatatatatatatatatatatatatacacacacacacacatacacacacatatataatcatttaattggctaggtttgtattaacttcatgatattcaaagaactagcttaaaataattttacaaatcactacaataaataaactgcttgatgagtctaaattattggtacaggttcaaagaaagcaaaaaatgaggctatgacagagagcagaattagaaaggaaatatttgcccggtgatgcaattaaaataatacattaaaattttaagtacagcaaatcagtgggaaaagaaaaagaaactgagtagctactaaaatcaatgaatggacatatttgaagttagggctataagaaaaactgcagtataattatttaatgtatcaatgaccttgttgaaaatgtgaacagtaggtagttattccaataagaaggcacaataatagcacgtaagattgataagattcatttaataaggcatgtgattatagtgataactactacaagatggatgttattgtttgtatccagatgaattccattagaatcactttaaaggactaggataagaaatctgttcaagctgttgtcctagctcaatgtttgaaatcccaagggagagaggtaataaataagttaaatgcaataacaaagcacccttatctaaagctgagttcctggagtagcataaaaatcagaagctctttatgctgggatggatttttcaaagtacaagtttctccttgccttttaataagtatctggataaaagacaagggaggtcattggccaaagggaaaaatagtatgatttattttaaaatttagttagtagaatgttattttataaaatctgcatttggttattagaaccctgaaatttttccttacatttattaatgaaatctgcaggttatatccataaccatgaccaaggccagtcagttgtatcgattataatcaggaaaagcatgctaaatagatcaaaaaagaacctcataatatatgaatgaacaggcaacaggtccaactttgacctttcttagaacaatcctataatattttactttactacctttctttttattttacccattataagttgatgtgtgttattttaatcattcacagggttacctgttttcacataaatatttggaataaaatatttaagaaggattcttatagcagctctagggaattggacctgagaagtatttttttctaaaagagaaggtaaaattggttgtgcaactgataataccacccattcacatcctaagaatatcaacttctaatttttcttttttatgtttttgcctgcatattgtaattcattattaagtaaggagattttttaaaaatacattcttataatctccttgttaatgcagtttttctcattaatgaacaggaaaattcactttattgatataatttactattcactttttcttaactgtttcaactagtttgccatcaagggtttgtcctgtcttggtcagtctcattcatatgtgattgactacagatggtattaaatagacagatggtattaaacaaagactagaagctagtgatcattaagttattcaatgctcctactttcaaaggggcagtttttcactacactgtcatcctttttataatataaagttgcatatatatccatatatgttatatatatatacccatatatctctgtatgtgggtattcctatatccatatctcatatctccatctatatgtatatgtgtatttctatacacccaatagccagagagatacatataggtagataagtaggcagagatattaaaaaagatatacattttgctattttttttttttgagatggagtttcactcttattgcccaggctggagtgctatggctcaatctttgctcactgcaaccttcgcctcttgggttcaagtgattctcctgcctcagtctcccaagtagctgggattacagacatgcatcaccatgcccagctaattttgtatttttagtagagatggggtttcactatgttggtcaggctggtctcaaactcctgacctcaggtgatccatacacctcggcctcccaaagtgctgagattacaggtgtgagccaccgcacctggcctaaattttgccatgtttatatatgaataaagtgcatgaagtgcaaggtggctgttatgatcaacaaagagaattcttcaaagaagctagtaagagctaaatagccaaaagctgagaagatcagaacaaacaaaagatgttactgggttctagtactcttaagatctatgtttctcccttccaattatttacttcatagaaaaggcggtcagattatcctagtctgactgaggctacacaaacctgtcttaattttctgtgtagtggggcaatgttcatggagctcagacacaggtacaagagctcaatctcagattattagaatcatgacgaatttatcagcctccccacagacatttacttcatgtgagttagatgagattatacagctacgtggtctaggaagatgtgagaccataatatagagtgcccccacttcagtattctccctcataacgacacttttaacattatttctaggacagctgggacctaagcccattgttttgtttttttccaatagaggctgtaaattaatatgcagtaatgtatcaatccaatagagattcgattttttatttgacttcagtcatgtataaatgccaatcccaaactactccttttcagagttgattcctattctattagcttttaaaactgatataaagattgagctaaaaaaagtctatcattagaatgtcagatgtaatgaaacataaagaaataaaaaacaagtcaggcaacagtggctcgcaatttgggaggccaaggtgggaggattgcttgaggccacacacgttagagaccagcctgggcaacatggcaaaacctcatctctactaaaaatacgaaaattagccaggtgtggtgtcgcgggcctgtagtcccagctactcagtagtccgaggtgggaggatcacttgaacccaggtggttgaggctgcagtgagccatgatagtgccactgcactccagcctggatgacagagcaagactctgtctcaaaaaattttcttctttgattgaaagtttttcctcccagtcatttcaaaaagagggagaaataaaaggagatttcaataaaaatgctgattatttcctgttaattttgagtaaatgatataggttgtttggctgaaaactgccctttaagctcgcttcattagtcacgactagcatgtgctataatttaagacaaagcccacatagtacaaacaagggagcaattactttggcttaaagcttgtagtgctttgaactttattttttctttaacaagatcacttttggactttgtacagattttattttctcacataaaattatgtccttatctacatttattaaatgtaagatttaattttattgacagaaatatagaaatgctacattaattgccacaggctgggtgatgcagaatatggtaagttaagtattaatgagaattgtattttactgtgttccaagagccaaagaagtgtttgacataatatttacgagtctgaattatagggacattctaacagcattaagaaatcatatatgaaaaaaattatatgccataaaactattttatctgaatcatatttcttagtattcttctctattaaacagctgacttagggctttagaatatcctgagaaatgatgtccttctaagtgggatttataaatacttcttgacaagaaaagatacatttactccaatttttagcatgtgttattttatgacctcaaattgcaaccctagattttttcccttattgaaatatttttagatttctggtagaaaaatgtatttcaaatcattgtgcaagagaaatatttctttaaagggaaaatgaactataatattaaaaagagacaagcttttggggggtttttgcaatctgtttaacaggagaaataaaaaatacatgaaaacatttttgtgcttgaaacaaactattttatgctaaagtgaaactgtcaaaatcagcaaatatttattgggcatctctgtgtttaagaaactcttcatatatccatacatgtcatatatatccatgtagatagatggatttccatatacccatgtcatcacagccccgtgctgtgggtttacaggacctaaagaaaaacattgctgcattaaaaataacttacaagaaaaggctttcataccaattatagtagaccacttataaggatttctaggcacagtaaagtagcatagtacttgactaatggttagataataataatgccattaatttgcagaagtcagtctcagggctggtcagtgcagtgagtgggtacttctgcaattctctctctctttttttttttattccaataaggctgtgctaactccaaatgccacattctcccattacaatgcataacactggaagaaaaaagagtagaaaagggaaactctattaccctatatttttctttaaacagtgaaaagtgtttctgaaaagcgcttatctgacttgcagagtaatgagggcaaaagttaatatgatacgccttgaccagtggctcttaaagtgtcatctatggcaagttgttagaaatccaaattttcaggttccaaaccaatcttaccgagttagaaactggcagtggagcctgcagatgattaacaagctcctcagaacattttgaagtactctaatgtttgagaattactgcgttacaccaattgtgactcacttccagcggctggatatgaattggagtaaggtctctaatcatacatttcagaattctcaccgaactctaggctgttctgcattttttcgtgtgacttgaaataacaattagaagtcatcaaaggccatcacatttatagatagaaagttcatacaaatgatagagtccattattataagatatcatttctcctttagggcttttagttgcaagtaacaaacatggaaatttaactgaaactggcttgaacagaaaaggagtagagaagggactcatgtaattcaggtcatgtagggtcttattaagaaactcaagtgacagacacagtcatagctgggcttagatcttttctcttccaggctggctttactcatggcactggtttctaggagctccaggatggcattcatcaaagtgcaaatctagagaaaatataaagtttactttcacttactgaagagtctgattgaagattatatactatatgttgttcataattccttcctgaataatcacccttactgtagcaatgttttaggctgtttatctcagatccaattatatgcccattttcagacatgggaatagatttagactccaatcctgtgtttaaaaatgtggttatcacccacaattaggaaaggttccttaatcccaagagtgaagggacttgaggtggcaaaagtaaataatggccatttaaatctataaagtcatctgtgaggaatggaatacataaaagtcaataactaatcctaccttgggtccgtaaatgcccctgtgtatatacaagatgttgaaatctcttaatcatgattatggaaaggcaaatgatgtttttttccagagtaaagtcaatatacattgactacatgatgcagtaactagaaacgttaaagcagcctttggaaattatttttaagtcatgtttcctttttagtacttaaatctcaaatgaatcattttcatgtctccatctacaccgtccctacccagtttgattatctcccatcttggttatgctgttcgtcccttgctttaattttaatccttctctattctagcctctaggatatcagattgtttaagacaacttttcattttggaattaatttatacttacagaaataaatagggtaatacagaaagttctgttgtacccctcttccagtttcaccctttattaccacctcacagtaccctggtatattcatcgaaactaagatttcaacatcattttatgtgaactccagacattaattggatttcaccagtctttccacaaacatcctctgtttcagaacctgatacagagtaccacatggcatttacttgtcatgtctctccagtctcctctaatctgtgagagtttctcagtcttcgcttgtttccttgtcatcagacttggaattgtctgatgttttcctcatggttagattgaggttatagattcttggaaagaacatgtcagaggtgaagcaatcttctcacattttatgagggaacacacaatgtcaacataaaattattggtgagattaacctttacaatttgattaagatagttttgaccatgtttctctatttctctactataaaattcctatttcccctttcaacaccctccagactctcacagatatacatgtggaatattccttattccaaatacttgagaacagaactctttcatatgtcagatttcttttggattttggatatttgcattatacttactggttgagcatcccacatctgaaaatctgaaattggaaatgctccagtgagcattcatttgatggttatattcccactcaaaaagtttcagatgtttgatttttggatttggaatgctcaatctgtatatatcaggtttaaaaaaatgctaagatttctttctgcataatactttcatatgtccatggcccttaaagttggaagttcctatatgattggaatctacacatacatgcatacaaatacatacattcataaacaaatgcatatacactaattttaatgtcaaatgtggcatattcagaattcaccaaaacttaggaaatgatagtattaataatcaagccaaacttttctctgtgaaagactgtcaggccattggtgattaaaatttgtttactacctaactgggcatcatagtcaataggatagttctgagtcacaaatgcatcatggcaattttctttcatagtcaattccagcctttagggactaaagaaaaatatgttatttacaagaaaacaaacaaacaaccccatcagaaagtgggcaaaagatatgaacagacacttctcaaaagaagacatttatgtggcccacaaacatgaaaaaaagctcatcatcactggtcactagagaaatgcaaatcaaaaccacaatgagataccatcttataccagttagaatggcgatcattaaaaagtcaggaaacaacagatgctggagaggatgtggagaaataggaatgcttttaaaatattggtgggatggtaaattagttcagccattgtggaagacagtgtggcaattcctcaaggatctagaactagaaataccatttgacccagcaatcacattactgggtatatacccaaaggatgataaatcattctactacaaagaaacaggcacgtgtatgtttattgcagcactgttcacaatagcaaagacttggaaccaacccaaatgcccatcaatgatagactggataaagaaaatgtggcacatgtacaccatggaatactatgcagccatgaaaaaggatgagttcatgtcctttgcagggacatggaggaagctagaaaccatcattctcagcaaaccaacacaggaacagaaaaccaaacaccacgtattctcactcataagtgggagctgaatatttctttcaaatatctgatctaataatatgatggccagtcatcacagtttgcacagtattatgctggttttagtatctgaattctctcaccctgggaaaacttttagtcttgttcatgtatggatttttaaacaactagctcacgttctcttaggtggtgctgtaggttgacaaagactctcttacaatatagtctccaggagattttagtagactttctataatctacccaggccatggtttagtgagattatgtcatgttaactgtatatgcaccaatatttgaaggcatgtacaaacatattttttatttaaaccagcatcaaattctaccaaaaccggcaagtttagtttgtaagtaaagatgaaatgactggacattctaaatggatggactttgagttcttttgtcagggtgctcaagatgatgcagacttacctatatgctctcaccttgcctccctggtgacctgcatgatttatttgtcagagaaaatgactaccttaaatctaagcaatgggtagttatcaaatctaaaaaaaatctatgtgactcaaagggaatttaaattcatgactctgcttcattaatactaatctcaaagcaagtcaacaagataaaagatattaactcttgtcccatcttcatgtggctcttgttgtattactaagggtcattggaggctgcctagctagtcactattctgaaaatgagactgacattaatcaaaaagatagcataatgaaagagcaaaagggaacaacttgttctaatcaacattgagtcattgataactccactaatcgaactcaaacaagtctgaaatactgtggtcttggaatcaaacttgaaaccagaggcagagtaatgcctgatacaatgaaatccaagctcagattactaggatttgtatcctgactctaccatttggcaactgtgtcctctggaaagttatttaacttttctggaacttcgtttcccaatttataaagtactattcctaagagtccctcccttatttcatcacaggtacaccgacttcatctattttcttaactcttctgagcttctattgacttacttgcaaattactggctttgactgcctcaattgagtgttgtcaggataaaatagaataacgtatgcaaagactccaacccacagcattattattattcagtaggttatagaggtgttatacataatttgtttttccctaataaataaaaatgggaacatgtgatttattatgttacacataattttcagttgtaaaacaatttatgttgctatgtgatgtatctttttgctgatgcatgcttgatgtcaggggcacggggcattgcacgttaaactttgtacacaaattattaatgtcaaaaataaaacctacagaagacggattagaaaataaatatttttatcttgagataaacaaaaaatccaagtcctaatcacctacatattttcagccacatgtgcagttctattagtaaaactctctctcttactaaggagtaaaattaaattttactcctttctcctattttaacctaaaatgatctctcctaatctttgcatagcaataataggtaggtaatacattaaaaacatcctttaatcaaaagtctatttcaaagttttacaaccacaagtcaaatttattttctgagggaattaatcttaatttatataatcaaaaacaatagatgcaggaggaaaacatgaaagcaaattctgaggaaatatttgtttcatagattcaggaaaacatttttcttcagatatgactgaatagtaataatttttgtcttacagttctttcacttgctttacttcagcatttacattagcattaatataattttatctacgatatattatttcaattattttatatacatcttcacttctaatttttctaaatatacttattgtattgcttcatttttttcattttcttctcatcatattaaccaacttaaattataatataaataattttgatagagagaataggaacattatccaatatgaacaccaattttgatgaaattcctgagaattaaatcttccaaaaactttatacatttaaatcagaatttttacacttctaaaaatagtatcttaaaatatattcaaataagcatgtaatcttaaaattattagttttctttagacaatagggtatggcgactatatttagcaacaatatattatatattttaaagttgctagaagagaagacttgaatttttcacaaatacacaaatgataaacactcaaagtgatggatgcctcaaataccctgactgatcattacacgtctatgcatgtaacaaaataccacatgcaccccataaataagtaaaatattatgtaccaataaaattagttttctcctaattttatttatttaattttatattccttcaattttttttgtaattgctatattggttagggtatacatagaagaaatgatatgattttacctattgaggaaaatattttgtgtgattttttaaaattccaaatgaagcttatttaaattgtctgtgccttggtgtgcttttttccttatattagtctaggaaatctcaattcaactgaaacaccttctttctaacttattttatcttatctaacttatctagcttactttctctttctaacttactttatcctagtgctcttgaatctattaatatgtaactatttccttactgagagtcagttaaacaagacttctttataacctctttgtctctttgcttccattcttttagattattgttaaattactgggtcccaggtgcaaggcttattctttccaaacagctgtgattagtggaatactattagtatctatattattcatatgtgatttaatcatagaaattccagttttacctcactagaattgttagatgaaatttctacattccctatcattttacttgtaacaatttccttttcaattctcaaaaataatttctaatgtatattttcctttgcttcttttagttttgatcaaagcgcactgagttcagataaaatgtgagtttccggcagggaaaaggcatcggtatcctttccttgccattgctatttattatttttccaaacagcagttcgcttctctacaccctgggctatttctcaactgaaatagattgtactctgaagttcagcaactgcttgtgattcagccctttggttctaacattagagtttcggttttaacatttgctactccatgatatttttgagacccagggcaaatctgtaaaggtgtttgctgtaatttcttcctttgtagtttacatagcgtaacatttttattggcaaacctgtaaaattcctttagaaaattataaatacaagcctcgattagagatttgggtatttgtctaatatgtctgtgtgcattattcatagctgtatacataataagaatactagaaatatatctggatattatttcaacatttttccttgaagtaattgtgtgataattgacaactcatctcacttttctagacttttaaatatatttttaaggtatagcatttatacaaaaaatgcacaaatcatcatgcatatctttatgaattttcacaaggttactacaccaatgtaaccagaatcaaacagagagaatataccagcatcacagaaacttctcgtgtccacttccagtaactgagaattatggataaccaatatgccaacacctaaacaacagattaactgatcttgtttagtaatccttattttttattttatatgactggaatcacacagaatacattactaggtgccctcttttcttttcctcaaaaagttacctttgtaatatttatccatgttgttgcatagttgtagtttacttattttcattctttacagtattccattgtgtaatcataccacaatctatttagttattcttagaatgtatttgctttctggtgaactaggaaatcgtttcctaaaataaatgtcaagtcagacgatgtatgtacatttttaattctagtactgaatttactcacaattcacaggatacgatagcaaaacaaaagcttagtctttaaggaggtccatgattgtcaatgctactcccacagtgccttttatctcttgtattaggccatgttctggtttaagtttaacataaaaagtttaagcaatatttttgctagggtatttgtttagtagcataattgtagaaggatttaatcagactatttccttttcaagtatccacattaaagggagaaaaataggctacaagtctccttctaaccttgatcttttccttctctctaaaaaaaaaatttttattcattcattcattcattcatctgttcttttttataccttctatttatatatgcagactagcatacttttatatatgtagtgatcaggacattatgtttttctagttggatttccagttgccacagtaccatttattaaaaagaattatcttttaataaagaattcattgtcataaataaggtgattatatatgggtgaatctgtttctgtgctctatattctgttcccactctctattttcttccataattacctagcatcattggtaaattgtcttaattactacaggtttatccaatatctgccactgtattttttctgtttttatctttcttctgtaaggttgccttaactgtccttagctccttgcattaattcataaattttataatcaaattttcattttcctcatgaataagagatttaaaaaaatcagattgggtagaactgtcacctttctgatactgattgttttaattcattgagttaagtcctttatttttgttatttgtgttttaatgttttaatatagttcttatacatattttgttaaaaccatgatctttttggtgtttgttgctattataaagattatcttttaaaattttactctaatgtctttgtaattggtaaacaaaatgaataccatttacttttacatatttgcttgtatccaataaattgttaaattaatagatatcctatgtacacaaataatttcatctgtgaataatgataattttttcctctttatttcaatctttatgtattttttcttgccttattatattagctaagaccctcagttcaatgtagaaaagacgaggtgatagtaaatatttttttcatccttgatgtcatcgggaaatactcttaatacttaatatttagtgtaatattaactattggccttttgtagatagctttttatcaggttagagaaatttcacactattcattttttgctaagtaatcttttttgtttgttttggttgtttctaatcatgtatagttacaaaatttttttcagatgacttttcagcatctgtcaaaataattacatagtttctcttctttattcttttgacatggtgaataatattgacttatgaatcttaacttcccttgaattcctgaaacaagccatattttgtcataatttactgtaattctttattgtgttagtctgttctcacactgctaataaagacataccccaagactcgataatttataaaggaaagaggtttaattgactcacagttccacatggctggagaggcctcacaatcatggcagaaggcgaacgaggagcaaattcacttcttacatggtgacaggcaagagagcttgtgcaggagaactcacatttataaaaccatcagatctcgtgagagttattcactaccacgagaacagtatgggggaaactgctcccatgattcaattatctccacctgggcccgtacttgacatgtggagattattacaattctggatgagatttgtgtgggaacacagccaaatcctatcatttatatatattcttaggcctaattgagtaatattttgtttctaagacagatctgtaactgtccttttgtctcacaacttttcagatattaatctcaagatgatagcttcatgaacttttgtaactctggaagatcattcaaaaacatttggaaattctgtatatctgtgttatttccattttaagtattttaaagaaattcctggggaagccatttgattctaggattggactcaagtttttaaagtattgctagtagtattatagtgttaaatgttataggctaacatataatgaactcttattttgttccaggaaaaatactgacataggttatcttattttttctgcatagaaactctgtgaggtattattattattttgaaaacttgagaattgaagtttaagggggataagcaccttgcccaaagtgacacaggtagttattaaaagaagttactacatgtcttctgagatccctccttgttccacagttcgtagaagaacatgtttccattttcttgctctctggtaacaaacaaaatgcaagcaagtcaccaatggcctcggctgaatgttactttaaaatgcacttcattctctacaacacttatccttccattgttaacatccttcccgatcattcctattatactccctggaagcacattttctgataaatataaaaatgaaagtcaatataaaaacaaaatacttcaatttcttccacattttcatagagtactttctgaaccattgtgtattagttgaactccaaatgtatcccgaaaatggcatttcccttaaacctttttattgtggctactcattttcctgtcccatcttcaatgaagggactaaatcatttcagcatttttttttttttgcgggtctcctatttctactttcaaacacttcggtgcaacattttgcacaatctcttggaagttcatgctcagtaataataccaccagctgtgggtatttgttgtcataatatagtgatcatttctccaaagagattgaggaatatcacacttggataacagtcatttgattcttccatttcttcttttctaaattcgtattggattacttcaatatacataaataggatctaccaaatactctattagcataacttttgaaatcatcaactttcacttcagtttcactctgcttctaaaatgatcctaggttgggccatgctcctttatctagggctcttatacttattatctcaaatttcaacaccttgttttcgaaatataacctatttgcctttctggctatcatttgtcccttaatctagggcatatttcctttgacaacagtgtgatcttctgtgtcatttcaaccattttcattagagcatctgcatcctttgattttcacaacatgaaaaaatcagagctctgagtattggttaataaaaactgtctccttttccactacaacagcagaatgcccactttcataagggaaaatacagaagagtcctttgaactggtacagtctacatataacttctgcagtctcctcagtggttctgagaaagaatttgctaactggtgaacttttttttttttctatttccccagtggcaattttaattattcactgtgtcttcacagttgttttccatgatctttcaactttcatttttagctgatgttcttgcccaactacttcacttggaataaaacaagattaggttaaaaagatctatcaatttcttatattaaaatatgaagactcccatctgtagccacaacgacactatatttatttttccattgttatcggtaaaaatgtctttccacttatgtgcctgaaattattccctcccttacttgcctaggggactttttctatcaattctctccttcattatttatccagaatataattatttaattcttactgtgtaattaacacatcactagatgttttggatatattggtgaacaaaatagaaaaacaatgttttatcttgataggtaaattataatgggaaggagaggataaatactaaacaataaataataaataaatacagataatagaatattagaagctggcagttttggaaatagagtaaatcacagtaaagaaaatcaggggtatttgaagagggctgagaaggttacagtatttaatagggtattataattgactacattgagaatgtaaatcttaagcaaaaagatgatttgataaagaatttatgaaattatacagggatgcatttctggcagaggtaacagctggagaaaagacactaagttgaaagcatgcctgatgagtttaagtaatagcaaggggactgggagttgctggtgtgggccagttaaagagagaataataggagttgatgacagagaacattagcttgacagattatataagaccttgaggtccatcgtaaggacctaggacattcaaaattgatagattgagacaaagaggaggaaacaaaaagatactaaggaatagcaatcagtgagacaggagaaaaatgaagagaatcttgtatcttacaaatcaagagaaaaaactatgcctatgaaggctcagctgagtgaaatcctgatgatcagtcaagtagaataggaaacacaaatgtaccattgcttttggcaatatgaaagttgttagggatagtatcaaaggcagtttcagtgaaatcatgggcacagtctcagttaaatttaagagagattgtgagaagaggacttaaaaacagtgagaggagacaatgtttttgcagagttttgctgcaaaggatagcaaataagtcaggtaatagtggggaaagtttcaaatcagagacatatgatcagcatgtttgtatctgaatcagaataattagagtgtgaaatattgagtatgtaggagaaagcagaaggaaaaaattctggtgttatatccctaagttggcaagagaagatgagacctgactctaagaagtgggaaggcagggaagtgaatgcagacttatgggtgaataggtgttgtgattggttatgtggaagctcttttcagattgcttcagttttctcagtgaaacagcaagcacaatcagcaactgggacaaaggtaggggtgtgatactggaagctcgaggagagagagcgtgtcaaatactattgagaatgtggaggcatgaacataccaacaatatgtgatgtgacgtctgccagcattaaaggtttgcttaaagtctattgctattaatttatagtgacagcagtcagtgtatttttttattcacctttactttgctagatagatgcagatatgaagtagacacagaagttgctgtattgttgaatttaaccatcattatggttttgccaaagagttctgttttcatgctgctaataagacatacctgagactgggtaatttagaaagggaagagctttaattgactcacacttccacatggctggagagccctcacaatcatggcgaaaggcaattgaggaacaaagtcgcgtcttacatggtggcaggtgagagagcttgtgtaggggaactcccatttataaaaccatcagatctcctaaaatttattcactaccacgagaacagtatggaggaaactacccccatgattcaattaactccacctggccctgcccttgacacgtgggaattattacaattcaaggtgagttttggttggagacacagccaaaccatatcaagtccagtaaagcaagaacagaaaggaatcaggggtacttcagggattatgatgactggccatgtaatttgagaggggacattttggggacagaagaccacaaaaaggaagaatctctgaaccagagactttaaggtagtggtcgacatttttggcaccagggacaggtttcgtggaagacattttttctgtgaagtgggtagaggtgggggatgatttggggatgcaatagttccacctcagatcattaggcattagttaaattctcagagggatgcacaacctagatcccttgcttgcacagttcacaatagagttcattctcctatgagaatctaatgctgccactgctctgacaggaggcagagcttaggtgggaatgctctcttgcctgctgctcacctcctgctctgcagcccagttcctaacaggcatgcacaaatactgacccatggccagggttagggactcctactctagttgactcaaaggatggctaagatggaattacaagagggagtgattgcaaagttagctgtgtctgttcttacttctgtgccatagtgaagtgtttcctggccattgccatatccttcataagcttccactgatgcctagccctgtaagaaaaaaagtggatacacatatccttctgtcctctgtgtggtacactaggctttgatgtcttacagcacttttagtgactcctttcagtttttacttgctgctttcccatcttcttctcctgtgataaatccaggaaagacacgtctaaatgatagccctctaccaaaggccaagctttctgtctttgtatactcagggtacgtcgtctttgaaatactcagtatttgacatactcagggtatgttgtcttccaggaggcctcttatttctatctgacaattcaccgtcagtgttttgttgaatcagtataaatcaatcttactcatctcatgtatatgcttgtctatctctactttgatgaatttctcaaaatcagggcctgtctcttagtcactgtatctatgtacaagacctagccaatggctagcataaaataacgtatcctaattaatcaaaagatctgttatcacctgaaattcagctccatatctaattacatacttgatctatcatgactatttcccattcaccacacgtttggaaaatataacattgagctaattcattacttacctatccagagaggctcactgctctgatgtccttctccaccaccccgctccctgcaagtattcacaacattttctaaaccacctatgtttggaactctgggtctttctttcatctcacttctgcatttttcagatccctttaccaaaccttataagtaatttatatttctttcatctggcttttgctgtttccagatccctttaccaagccctataaacaaatattttaaaatgtcttattcactaatttctttatttttatttctattgcagtcactctttttcttagattcagagtcatttactcattctataaattatttttaagcacctactaagagccagagacctactaagtgctaggtgctggagagagagttttaaacaaaccacgcaaagtctattctttcatggagcttgcattctaaatgccttagcaagaaagtataaaatagtgcttctgtgctatttaagaatttaaaaccgagtttgggatagaaagtgacctggagtctactttacattgagtgatggaaggttccctgagaaagtgacatgaaaactgacctaaattaatgacattcactgacacctttgctgactgttccacatctcttgtatctcactctgtcctacagatctttctgccctcgcacttatttagtgtattacataaggtagccattgaaaatatgtaacttggtatttttatcataattgtctcaggtatatcaactatgaacttagagtataaagtctctgagagtgagactatcaccatctataccaacatgcaaaggaaggagcctctgaaatgggaggtaaaatgttagctttcctgtttttatactcagaattttagttttatatttgttaatagaaattttaagattaatttaaaaatagattcacttattcctaaaactcttcatatttatcacctgaatatgaattcctccagcagtgttttttttccactaatatcacctacacattgctgctctccttctatgactttttgaatgcacataaacttattgtttcatttctgaaacgcacttaagtcttcctgaggctatattcaatagcaattaaatttaacttgtgtcataccaataatacacataactcagttaaaatgacaatgaacagctttgaatgggttcacaggtccacagcaatagcatgcttaccacctgagtgactgtgattgacaggcaccatacccagattgtaggatgtgctctaattttacagatcttacattgaaaggttaaaaaaaaatttatcttagaaatgctaaaatgaagtaatctatcctcagctgatgttccatggaagagccctctgtaggagattgacaggtatgctgaaaagagtttgggaatgctgagttaaatacagttaaattggagtctcaggaccttccagaatcttcagtatgcaataggaactatgtattccaaaaggatttatttttcagtgtttaactaagaacccttgttttcactgttctcagcctttggagttagtgttctatgggataaaatttgggcactgatctggacagcagaaataatatccaaagaaatataggttattacttgatccatagataagaaaatgcaggattttagtgagctgtaaaagcctgaagatcaagatgtggacctgaaggcccatctatttgagacatccactggctgtgggcctcttcctcttaagctggctataaaatcaatatagctcataccatcttcctattaacatttccccctgtagttagctgcatgtcctagattttcaacatggtccaagtataaaatactttgtcccattatcaactaagtatctcatgtgatttcttgcaaagtcaggttattagaatataatgtgggcacgacacacagaggcagagcccaacctcagcaacctttttccccttgaaatgtttattttcaaaattatcatacaaaaattcgaaagaaagaacaataaacatttgcatagctttctattctcacttttacgctaatgtactttgagtctagaggtaaggcatttcagtgctctcatgaatgaaatgatgtagttgtgtgatcttcagggattcatttgcctttaacattttgtaagaccatgtaagtcataagtaattataataataaaaaatttagaaaatattatctttcatttctagcaccattattcaaatcttagtaacaccacaatgtttatctgtgcctggcatttttcatttcacataatttctagtagcacgaataaacatttaacaagagattcctaggaggaaaactgaccttctaagactaaagcccaagggagtcacaattaaggatttgaaataattagtctggttctgtaatgttgtacctccttttattcttaccatttagtctcattccgaaagtttaactaaccctaagtacatttatcattccaggagcgttattatactctgcgtctagcaacatcttaggtatcaaataattcatcttgcaaagtagaagcaccttttatttttcttctcttcctatatctcagtatcttaattgcaatgactcatgagctgactttttttgtttttttcccggtttgctcacggtcgtgctgatgtgtcacagaacagtgactacaacttctgctgtaattgatgggaacgaattcttctgggatgtgttaatacagctgcaggcagtaaggcaagcagcgaatggaaactaaatgggttcaggagctctagagacaatgatgttgctggaggcggagaggtaggcagccactaataactacagctaaacagtgggacaaaatcatgcactaggtttgtttcaccaatcagtatatatcatatgcatttggcagttcggagtaattctttctttcccaaaccaattagcccttcactgtggtgctaactagtgcatatgtagctgctagttagaataatcactagcattaggagatatacgtaatgtaaatgacgagttaatgggtgcagcacaccaacatggcacatgtatacatatgtaacaaacctgcacgttgtggacatgtaccctagtacttaaagtataaaaaaaaatgtaaaaaaaaaaaaaagaataatcactaggcctttgattttatgtgcccatgttaaagatatagattttctttggtgttttgaagacaaactatgtctttcttaatcttgaatactttttccaaagaccatgattctatttagcttgaaattaagattattcctggccgggcgcggtggctcacgcctgtaatcccagcactttgggaggcagaagcgggtggatcatgaggtcaggagatcgagaccatcctggctaacacagtgaaaccccgtctctactaaaaatacaaaaattatcggggcttggtggtgggcgcctgtagtcccaactactcgggaggctgaggcagaatggcgtgaaccctggaggcggagcttgcagtgagccgagattgcgccactgcgctccaacctgggagacagagtgagactccgtctcaaaaaacaaaacaaaaaaaaaagattattctttacatattcgtttggtgttctaaactttctaaacttggaaccatataattatagttttggttcaaacatttaattttgctggttgggtgtggttaatcccagcattttggaaggccaaggcaggaggattgcttgagaccaggagtttgagaccagcctgggcaacatagtaagactatgtctgcaaaatcaatcaatcaatcattcatcatcatcataattttgctgatcaggagtttggtctaaaaagaatgagttagttgcccaagatctcagcactgcttatgggcagtcttcaggtaaaagaaaatgataaggttcatcatggttagatttaccagcaattcggtaaaatatactgagagcttatagtgtgttacgcataggacaggggtgcaaagatgaatttaattgacacttggaaatatacaaacacaaattatttccaggtatatattctttaccagtgacatgtacaaagtgctgcatgggagaaaaaaaatcttaatttggattggagagttggaagacaatgaaacacatacagtcagtggcagatattattggtggaaaagcagaagtcctgttgcagagtccttgcagactgtagtggcattttgtgaacgtatttataatctgagtttcacaaatatgtaaaactacaattttcctacctgtaatttgtatttgtttcatagcacaatgaagagaagccagaatgtatttagattttatgtggaatctttagatattaaaatcaccttattttcatttctccaaatagaaataaatgttccatgctcttgtcatggccaatttcgcttactaaataacaaaaaacaaaggcatattgtttttcacagccttggcttgacgttatgtgggtgacttccatggctatctacatatccttggttttgatactaaacatcgtatcgattactgttattacaaagataactgtatataaaggtcctagagtcgtcaagtcattattcataattcctttaacaggcatatttctttgtaaataaagaattgggcatgaagttaacttacatgtccagttgggaagaatttaatgactctaccaccatatggtgtctggcatcttcctagagagccacaagtcacaacataaaaaatcactgcactacagtgtcagacatggatttcagcctcctgctgaaatactcaaggagtgttcaatatttgtgtcagctttcagcaggcattttgatgaatatgaatgtaatagaaatgtctgaatctgtgtatgaatcaaatataagccaaatattaactgcctcctaagagaaaatgctttgattattttttcacttgtttttctgtctgcctggtcatttcttgaggcatcagacttcatactggtttagtgttggagtctcattcttccggggaggaaggacaaattaaggggacatataaaaaattttttttaaaagtatcttaaatctgttactttttgaaaggacaactataaagtttactatcttccaaagaggtcttaaaattcataaaggagagtttaattgcaggatttatgttataattatgcatagccagaaagtcatgaagcaatactaaacattcctcacatgctgtcaagtccactgtcttcaaaataattgtaatgtaaacggttatgtctgaccaaaaggtaaagcgtcctcacatctcatgtaaattaaatgtttcagaggttagagaatgacaaacctgctcttcaccccctatttagagaaataagggtagtttaagttgggcataataatgtagataaagtaatacaaataaaacaacaaagttatccagttattttgttgtggacattgtggctccagaacttttattaactgctcactggtatacaatggcttcattaagtgctattatcaggttttaaaagagtgtctttacaaccttatgttattcaaaaacttgggagaacttctttagactgtaagtcttcagggagaaatgattttttcaaaagaaaaatacatgaaaagtacctaggtttatatttctctggccataattgaccagctacggttttagagatcaatttgtggcttgtgtgtttatatctgtccctttagacattgtaaatttttatacaaaagagtagctgcaaatgttctccttcccaactgacaaaagaagaagaagaaataaataaataataccgttaacatgaaagagttcataggtggtgtggaatttcaataggaaacctaagcctggattaaagggcttgatacatatacacttggatttctcatatgtaaaataaaggattacattaaataaccttctaattttaactttcgttacttcatgattcataatattgattcttaagaatcatttctctttgtttttttttttggataaataaatgccttgcatgtaagtataaaaaatactctgaatcagtcaccaattgttcttcttcagtaactatggtttcctatatacttgttaaaatgttctatcctcttactattgccaatttcacttactaaataatataaaaaagaaaaaaacactgttttttatacctttgtcaataaattatggacgtccatggttgtctacgtatgtggctgtccacatatagtaaatacatattttatgtattctaattaatgtagttcacatttttatatgccccaagcactcacgtgccttatgttcagttgggaaggcaagtcatgtagaatcatactaccaaactctacttctgtattaaataggaccctatacattctaattatgatacttttactatcgatggagagagagagagagagagggagagagagagagattctacgttgaatagaagacatcatcaggcaagatgatattaaatccctttgaagattatttttctatcggtagtgggttgagtggtagtcctccaagagatattttcacgtggaacatgcaaatgtgacttttttttagaataaggatctttgcagatgtgattaaataaatatattgaaagagaaaatcctgattaattagagtgagccctcaatccaatgtaaaatatccttagaaaagaagagaaggggagaagatacatgagaaaggacgtctgacaatggaagcagaaacttgggtaatgcagccccaggaacatctggagccatcagaatttgcaagaggcaaggaaggattctttcctagagccctcagggggagtaaggggcctcttgacatctgggtttaggagctctggtcaccgaatctatgagaagagacatttaggttgttttaagctatcagtttgttatggcagccccagtaaactaatacactatcattgtcataaactttataaaaccaggactaatacatacatggaaagctgaatccatttaggaactatatagcacattcaaactgagaaattcaagagaaggtaacaaagtgactctttacaaatgtgaggtcaggatacaggacagcgaaagtggtagtgtggtaagggtgcttgctagggctgtcataaccaaacatcacaggctatgtagcttaaacaacaggaatttattttctcacagttctggaagctggaagtccaagaccaaggtgctggcagggttggtgtctcccaaggcctcctcctgggttgcagatggccacctgctcactgtgacctcatatagcctattctctttgcactgcatacgtggtctctcatacatgtcctaatcttctcttcttgttaggtgggtgcaaaagtaattgcgttttttgccattgtatagagacaccagtcagactggattagggcccataataagagcctccttttcacgtaattacctctttgagggccctatctccatatacagccacattctaatgcactgggggaatagagctttaacatatgaatttagaggagttacaatttagttcataacattgctcttagcaaggccccaaagggtgagaacaggatgaaattatttgaacccaaagacacagaaggctttgtggagagggttgccttctaggagctgccagctttgatggagagataacagcaaagccacagaggaaggcaagctagagagtcaattcttctcttccttaattcatctcagggcaagaaacaccacctcgataagacatacacagcaggcttccagtgcccagagcaaggctgagaaggatggagagagagtctgaggtggccaatggaagacacttagcaaaactgaacattgaaaatcatttcatggagaccactttagccaactctgcagcctgaatgtgttagcaaaatgggtctggagtaacaaaatacatcttaccaactcttactataactgaggagttcatgaaaatggtctagaagaataaagtacatgttgacaactcattataactgaggagttaataaaaacaacataaatttgtataatatgatctcaaaattataggcatgccctggaagttctaaaaatcttaattcttactaaattatgttttgtattttcaattgaagtgtatgtatttatgtcttcataaacactatgtggtttagaacatcacagatgttgacaggcattctaagatttaagcgctgaatgcttagcagggctgtactcctgatattcaaaatgcacttactcacattttaacttacctatactctaggtatcttctttgttatgtggaaagattattaatatccaagaatattacaaacttatgggatatgattttaataaaacaattgctagagaaatgatttttgcgtgtagcatagttcttactgtatcttcactacccagcactaattgatatttgataaacatttacttaactgaattaaactgcaaatagacttggctcattttcctacatatataaataagcccctagtacataattattatttgaacatctttatgtattagaaactaagtaataggtggtaaatattgggatttattaccaggctgttcttattgcccatagactccttagtcattttatattaagccgtttaataaataaaataaataaaaatgattatttttaacaaatcgtctcatatattgatatgtatattgtttttctaatcatatttggcagggaaatgaaattgctttgggtggaaagctgtcaggaatattcttgagacttaactcctacatgaaaatactgattgttaaatccctaaaaataattaaattaatgcttctatatgtgttgatatattttcctgagaatagatgatgtggggaaaagaattgtatctcattataatttgtgatcaatttcactagaaaatatttcagaacaacagtcaaaattgtgaaactaattaaaatgtatacagcagctgagaaaaagttgccaccagagggcactactgctctttacaaaccaagttttagcaataacaaatactgaagatttaatggctagggggtcgacgtggcaaatttggatatgcatatgaaatgctccaaaaataataaattcattaaagttaatattatttatcagacagtttacgaactgagcactgaaactgccattcccatcaacccaatttgactagtctttgatatgtacatgcgggacaaaaaatacacataaaggaaaatatatttatggcatttcagttactttactcagataaattatctcatatattcattgtaaagaaggattctgcacctcttaatataaaataataatgtgaataataagctgggtacatagattaacatctctttgaagtgctgtgatgtatttacacatatgcaatttatattcataacacagtataaattcatgcatacacatccacagcgagaagggagacaagtagtataatcaccaatttaaaaaggaagaaattgaggtgcagaatgtcatagcttacctaaatcacagagcagctagggtgtaatacgtatttgtgtatgtgcacacataggggcaaaaatggggacaaaatattatttctctacaatggaattattcaccattaaataatgtataatatacacatataacatacacattttggagagagaaaataaaccttaattattatgttttgttaatagtaattattatgtttgttaatagtaactaattattatgttttgtcaatagttatcattaaaaaaatccttgctgtacttactatgaactgaaaatcaaataactaacagaaatgtaagccatatcctttgatgtaaaacaagaaaaatagaattaagtgaatatgatgcatatgccaaaacaacacacatagcatcgttttatgtgaaaaatatgctgttatacagaatttaggagatcactgtgagttgcagtaaactaaaagtgttctatgcagaagatggaactgtaatgtgatctttacattttagcaaaattcagataggtggtgagggcattatagcatgagaaaaggctcggagatcctgatgttccagacacatatggtggcagttcatatttaaatctggctggagaaggggtaaggagaaataattggaggaatctagaaagatatatcagaaacagcttgtgtgtgattttgaactccagtcttggttgccttggtgtgatgaaaactatttatatcagctgtgtgacatgatcaatgagcagcgtttagggtgattaacctatttgcaagacaagcagaaactttagtgagagacgacctgtgaagaatctgttccacagaacgaacttgagaggtatgagccttcattaggataatggtgacagatgtggaaagggaaggactaaaatagacatcatttagaaatatgaaacaggatggattttaatcacagaaaaggggggaagataagaaatggtcatgagaatttaagcctagagaacatgaagagaaagcagatttgcaccaaaaagacacaaaaaattcagttcagttttagatattttaagatgtctttcatttgtttaaatataatgattctccttagagatgcaaagcagaaaaaagttagattgtcagtatagatttaaaaacttatatttaaaaatgttaatttaaccagaaggaggagattaatttctgagcgaagagaaaatgggaaataagggattaagggccaaaaatgtgagttaatccacattttatgttagagaaagaatagtcaccactgaaatatttaaaataattatcttagatgtgtatgggagatgaaatatgaattcaccagagccaaagaataagggattccctgaagtaaaattccaaaaacaggacaagggggtaggaaagatatcatggaatgaattaagaacaggtcaaggccatattggaaattgtcattttatcaaagttttggggaaataagtcaagtgttggtgggtttgcagtggagaaacaggcaaacaactgcttgagaatcgaggcagtaaaatgaaatcaaataggaaattaggattaaagtgttcactgttagggttaaatcttgtgttataatatttagaaaacacaggatgatagtatttaggatacagcatggaatgcttttaaccaaacaagaaaaagaaagaagagaaatgaaatatccaaaataaagagaataattgaaagacaaaatgtcagaggagatagagggatggaggacgtagggctgaagggacagccatggaaagctgtgataatataatttgatagccctgaagagaagtgttatactaaggcttagacggggatgttctcagctatctgaaatctattgtgaaattacatgtggaacaagccaattaagaaaaaaccaagatagttttcatcatataaacagaaccagtgtcaaaacccacatgattatctcaatagatgcagaaagggccttgaataaaattcaacactccatcatgcaaaaaactctcattaaactaggtattgatggaacatatctcaaaataataagagctatttacgacaaacccacagccaatatcatactgaatgggcaaaagctggaagcattccctttgaaaaccggcacaagacaaggatgccccctctcaccactcctattcaacatagtattggaagttccgcccagggaaatcaggcaagagaaaggaataaagggtattcaaataggaagagatgaagtcaaattgtccctctttgcagatgacatgattgtgtatttagaaaatcccatcatctcagccccaaatctccttaagctgataagcaacttcagcaatgtctcaggatacaaaatcaatgtgcaaaaaccacaagcattcctatacaccaataatagacagagagccaaatcatgagtgaactcccattcacaattgctacaaaaagaataaaatacctaggaatacaacttaaagggatgtgaaggacctcttcatggagaactacaaaccaccgctcaaggaaataaaagaggacacaaacaaacggaaaaacattccacgctcatggataagaagaatcaatatcgtgaaaatggtcatactgcccgaagtgatttatagatttaatgctatccctatcaagcgatcattgattttcttcacagaattagaaaaaactactttaaatttcatatggaaccaaaggagaggcagcatagccaagaaaatcctaagcaaaaggaacaaagctagagacatcagctactggacttcaaactatgctacaaggctacagtaaccaaaacagcatggtactggtaccaaaacagatatatagaccaatggaacagaacagaggcttcagaaataatgccccacctctataaccatctgatctttgacaaacctgacaaaaacaggcaatggggaaaggatttcctatttaataaatagtgttgggaaaactggctagccatatgctgaaactggctagccaaagtgaaactggaccccttccttacaccttatacaaaaattaactcatgatgaattaaagagttaaacgtaaggcctaaaaccataaaaactctagaagaaaacctaggcaataccattcaggacataggcatgggcaaacacttcatgactgaaacaccaaaaacaatggaaacaaaagccaaaatggacaaatgggatctgtttaaactaaagagcttctgcacagcaaaagaaactgtcatcagagtgaacaggcaacctgcagaatgggagaaaatttttgcaatctatccatctgactaagggctaatatctagaatctacaaggaacttaaatatatttacaagaaaaaaacaaccccatcaaaaagtgggcaaaggatatgaacagacacttctcaaaagaagacatttatgtggccaacaaacatgaaaaaaagcatatcatcactagtcgttagagaaatgcaaattaaaaccacaatgagataccatctcatgccagttagaatggcagtctttaaaaagtcagaaaacaacagatgctggagaggatgtggagaaataggaatgcttttacactgttggtgggattgtaagtcagttcaaccattgtggaagacagtgtggtgattcctcaaggatctagaaccagaaataccatttgacccagcaatcccattactgcatatatacccaaaagattatgaatcattctactataaagacacatgcacacatatgttcactgcagctctattcacaatagcaaagacttggaaccaacccaaatgtccatcaatgatagactggataaagaaaatgtagcacatatacaccatggaatactatgcagccatgaaaaaggtgaatttatgtcctttgcagggacatggatgaagctggaaaccatcattctcagcaaactatcacaggaacagaaaaaccaaacaccacatgttctcactcataagtgggagttgaacaatgagaacacatgcacgcagggaggggaacatcacacactggggcctgtcagagggtgggtggctaggtgagggatagcattaggagaaatatctaatgtagatgatgggttgatgggtgcagcaaaccaccatggcatgcgtatacctatgtaacaaacctgcaagttctgcacatgtatcccagaacttaaagtataataaaatatacatattttatatatatatatatatatatatatatatatatatatatatatatgatttagatggaaacatggattagtaaacaaatttatatcttttatagtttcgtcatactacaaacaaaaactatttccagaattttgactaattaaaggtactgagaataaaatttcattttactgcaagaaaaaaaaagaacagctactaaccatggtgccaaggatttcaatccaaggttttcaatgatgatattaaaagcataggaaacagtgaagcagagaagcagcttggttgtggacttattttgtttaaggttataatacatatattagccattttatattggatgcttacaagatttaagatatatttactactacttcactgaattttcaggaagaaaaactgatgcctcatcttataaggtattgactgttatctaggtctaaatataattaaattctattttataatgtttaaggttcaagtagtagaatattatcatggatttcttctggtagttaaaacaacgcaactcttttaagacagagccattttatacataattacggttttaaaaatcttaattttgatctaccacagacatgtatttttactagtatgagttcaataacgcaggaagtaccaccaatgtttcttttttaaaaaacaatgattgacatgtaataattatacatatttatggggcacagcatgatgttttggtacatttatactttgtgtactcataaaacagggtaattagcatttctatcatcttaaacatttatcatttctttgtgatgagaacattcaaaatgtctattctcattattttgaaataggcaatacactgttgttagcactaaccatcttactatacaatggagcaccagagcttcctcctcctatgcaactgtaatttggtatccattgaccaatctctctctagccctctggtaactactgttctagtctttacttacatgagaactacatttcagatgcctcatatgagtgagatcatatgatatttgtctttctgtgcctgtgttatttcacttaatatagtgtccttccagttaatccatgtttaccacaaatgacagaatttcattttttttttctatggctgaatagtattctattgtgtatacataccacattttccttattcatttttcagttgagggacatattggttgattccatatcttggctattacgaacagtgctgaaataaacataggagtgcagatatctttttgacatactcatttcatttcatttggatatatacccagtagtgggattgctggattacatggtagttttatttttaatttcttgagggaaatttaatctgttttccataatggctgtactaatttccactcccaccagcagtgtgtaaaagttgtcttttcttagcaacttcatccatacttatcttttaatgttttaatggtagccattctaacttgagtgaggtgatatctcattatagttttcacttaaatttttcagatgattagtgatgttgagtatgtttttttcatatacctgttggccatttgtatgtcttctttcaagaaatgtctgttcaggtctcttgattatttcttaatcaagttatttgtttatttgttgttgagttgtttaaattccttatatattttggatattaaccccttactagatgtatgttttgcaaatgttttcttccattctgtaggttgtctctttgttctgttgattgtttcctttgttgtgcaaacactttataagttgatgtaatctcatttgtctatatttgctttagttgctcgtgcttttgaggttttctccaaaaagtcctgtcctagactaatgtcattaagatttttcgtttttttttttctttttttgcttttaggtgttttatttagctctttaatgtattttgagttaatttttatatatggtgagagataaacaactaatttcattcttttgcctatggatatccagttttcacagcaccatttattgaggaagctctcctgtccccattgtatgtacttggcacctttgataaaaaatcaattggctgtagatgtgtggatttatttctgggatctctattctgtttcattggtccatatgcctgtttttatgccagtaccattttgttttggttattatagttttgcagtattttttttttttttgaagtcaggtagtgtgatgcctccagctttgttttttttttttttggtttgtttttgctcaatattgctttgactatttgggtattttgtggttctatacaaatattatgaattgaaaataattcctatgaagaatgtatgtcactggcattttgatatgaattgtattaaatctatagataactttggatagtatggacattttaacaatattaattctttcaatacatgaaaatgagatattgtaccattcttgtgtggtcttcaatttcttgcctccatattttatagttttcattggagagacatgtcacctccttggttaaatgtattcctagttttttcttttgaggggttttggtagctattataagtgggattgctttcttgattccatttttaggtaatttgccattggtatgtagagatgctgttgatttttctttttggaaagattgattgtggcatgatatttgggaaagtggtaattgttttatttattgtgtctaaattttccatgaagtttcttcttaaactttttccatgccacaccattcatagaaagtgaaaatgcaaggcagatcagaagaaatgtagcaggcatttcaagaccagtggtgacctattgaggggttcattcaccccagttaccatcttgagagtttagggttttctaatgtatgcttcattttaactaattgccacactgggttgtaagctgtgcttggaattaccattggtcaatgaaaccagacacatgggaattatccttaattcctcctcctttctcactgtcattcttagcaaaccacctagacctattttgaatctctttccttctatactcttatctcttgtcctggttcattgtatccccaaatactaatgatatataatataattaatatgctatatgattactataatacaattaatataataaatatgattatataataaaatatgattaatataatgtaatatgatacattggaaatctctctttgaatggggagatatttatcaggagctaggtatgaagtggaaaagtgattgataggttgcttctgtaccttgtgccaacctttgctattccaggaattcaggactcaatataattgagaaaatgggcagatgggattatttccatttaatttaacatttgactcaaattttttgctcattgctataattgcactgttgtatggtttaaaatgcttcatgtgcttcccacctccctagaactatgagtttctgatctccaattctgtaacttattcacatttatatatcaagcacatgccataatttctaagtcagagtaagagcttactttttaagtcattaaatgaataaattttttggatcaataatgtataagtcacctttaaaataaacagttccaggcatgcaagtatgagtaagacacatatttttactctaacagtggaggacatgaaaaggggataggtaggatgtgtattacatacacacaaaaaaaaacttgataagtgatatgaaagaaatacattaagtagtatgagagggatcatggccatatttgcagcttaatttagaatgcctgttcacgctgacagacaaagccctaaagttaacaccaaatgagcttctttcaggacaccatggtgctccggactctagatctttcattcatcatcaagttctaaaaaatattttgacaggttggatctataataaggtgaatttagtaaggcagaatttaataacgataaatgaaaacctgcatgcactcaagtgcaaaaatcaaaggagtaagaaagctttacatgttttttgactcttagctcaatacaaatcaacagtggttcagtttttaaaaaactttataaatataaacttcattatttccagagtatctacaataagacagataaaatttccctctctaccttgtacatgtaggaattcaccaaatgcatgagtactttattgatttattatttgtttaatttatatcctgcccaatttccaaaatgatttgaagcaactaccttggcctcattttgtataaagctttcagacaaaacaaaacttgtagaaaagtatagaaaaactagaaaaaaatctaatttgatgttttaaaggatctaaaacactattttcacagctgtgtaacattagcagcaattaataatttagcaatacattttatttttcactgaataaattcattaagcatttgttaaatgcctactatgtaccagatacactattagattttggggattcaatgggaaaagataaaatgataagaaaaaaatcttccttttgtttataacactcatgatctagctgagaaaaagacaatccaatgatctcaggaataaacgtgtaattgcagacacttattaattgctattatatgtcctgagaaggacaactataactctggaattgtgctctgaaggcataaccaatgagaagtattagattaagcaaaggtgtgatgtggtttggctctgtgtccccacgcaaaactcgccttgaactgtcataatccccacatgtcaagggcagaaccaggaggaggtaatcggatcatgggggcagtttctcctatgctgttctcatgataatgagtgagtctcacaagatctgctggttttataagtgtctggcatttccctgcttgcactcattctctctcctgccactctgtgaagaagtgcctcctgccatgactgtatgtttcctgaggccttcccagccatgggaaactgtgagtcaattaaaactcttttctttataaattacccggtcacaggtgtttcttcatagcagtgtgagaatggagtaataggagtgaactggtaccacagggaatggggtgctgctataatggtacctgaaaatgtggaagcgactctgaaactgggtaacaggcagagtttggaacagtttggagggctcagtggaagataggaagatgtgggaaagtttggaacttcctagggactattgaatggttttgatcaatatgttgacagtgaaatgggtaatgaagtctaggctgaagaggtctctgatggagattagaaacttattgggaactggagcaaaggtgattcttgctatgttttaacaaagagactggcagtgttttgaccctgcactagagatttgtggaactttgaacttgagagatgatttagggtacctagcagaatacatttctaagcagcaaggtgttcaaagggggacttcagtggtcttaaaagcattaagttttattcattcataaagatatggtttggaattggaacttatgtttaaaagggaagcacagcaaaaaagttcagaaaatttgcagcctgatgatgcgatggaaaagaaaaccccaatttctgaggtgaaattcaagccagctgcagacatttgcataagtaatgaggagccaaatgttaattttccaagacaatggggaaaatgtctctactgcatgtcagaggtctttacagcagcccctcccattacaggcctggaggtctagaaggaaaaaatggtttcctaggctatgtccatggcctctctgctgtgtgcagacttgagacttagtgctctgtgtcccagctactccagccatggctaaaagggaccaatgtagagctcaggtctttgcttcagagggtgcaaggcccaagccttggcagcttacacgtggtattgggcctatgggtgcacagaagtcaagaattgaggtttgggaacctctgcctagatttcaaaggatgtatggaaatgcctggatgtccaggcagaagtttgctgtggcagtggagccctcatggagaacctctcctagggcagtgtggaagggaaatgtggggtcaaagcccccatacatagcttttgtttctcttttttatatttataactaaagtttacacagtctattttatcaatgatgtctagtaagacaatgaatgaatactctttcaggataagtactaactccctactggggcactacctagtggagctgtgagaagagggtcgtcctccagaccccagaatggtctattaaccaacagcttgcaccgtgtgcttagaaaagccactgacactcaacaccagcctgtgaaagcagcctggagggtctgtaccctggaaagccacactggcagagcttcctaaggccttaggggccgtctcttgcatcagcgtgccctgtaggtgagatatggagtcaaaggagatcattttggaatcagattctttaggctcactcctgatacacattgtgttagcatgatgctaataaaattttattctgttatgatataatttatgtcctatggagcagtgtatttgaaatagttctaaactagaactgaaaatgtctggtttttagtcttgcttctgccattaaagagtaaatgtatcttggtactcattttactacctccagagattttaaaattaggttaatgttccattcatttttaatattcctctaagccatacctctcatattttaaccccctaagtaaatggtatggggaaagaaaacttatgtaatccacgtttcagttaggaaatacattttctaatattagattaaatataattaaaacaataataaaatatttgaaaacaataaaatgattcaatagtagaataagcaaaaatcagatatagaatgataaggcaaccccaaaacaggttgaataaaatcaacctgaacaaaagcaacagtgacttatatactaacttgaaaaattataatcagctacagaaatctgaataaattgaattatagtaattaacttgacagtataatctcaagaaaatagaaaaaaacccatgagtataatcaagtctagatgtcagataaacaagtagcaaaatatttttttaaaagctatgtatttttccctaccgatattcccaaattaatgtctaaatgaatgcaaatgtttatattccttgttgaaggatttttgcttatcactgaaatgtagtcacttctacaatgaaaccaaacttcattattcaaagacacaaatgtaaatgaactaattaccaaacatcaaatccaaattgtatattttacaagaggtttagcaatcaactgaattcagttggtagtcaacaggagttagtacttatcctgaaagagtattcattcactgtcttattagacatcattgataaaatagactatgtaaactttagctataaatataaaagagagaaacaaaagctatttaatactttcagcatttaagagtgaagtcaggctttgctgcaaagtagaaacttggtctggaaaaagaaacattgttcttgagttgaattgctagacatcaaaaagtacttacatgtcatggctgaccttgctggtttagaataagaaacatctcttgaagatatttcccaagcatttctcctcctccagttacttacttgactcctccctcaatcactcctgctgcccacgaacttcattaataagagtaggaaccacgaactttctaccttgcaacttcttcagagacagtatcaaaacaacaacccatttacacctccaaccaacttgtgtatcaccacagaatagtctcaggaattaagagtgtccactgtcagctacttgaagagttaaaaatgactactgttggctgggcacagtggctcacacctgtaatcccaacactttgggagggtgaggcaggcagatcacttgaggtcaggagttcaacaacagcctggccaacatgttgaaaccctctctctaataaaaaatacaaaaagtagctgggcgtggtggtgcacacctataatcccagctacttgggaggctgaggtgggagaatcacttgaacccggagggcagaggttgtagtgagctgagatcgtgccactccactccagcctgagtgacagagtgagactccgtctcaaacaacaacaacaacaacaacaacaacaacaaaaaaaaaacaaaaacaaagactactgttctttcagcattcattaataagagtaggaactattatttggatgaaaattaacttagaatttgctgaaaatgagtatgggacacctattctctggcaacactttgctataattgtgtctgagttagtgaatgaggtggatatgggccccgaccttaggaagttttagtctacttggggagagtcacatagcctaggatgtaacctgttaaagggatgctttgtccccactcttgatgtttccattccggtggagggaagtccaaagatataatgcttttagtttcattttgcctttaagaaatggagtgctttttttttcaagtaggtaaattaacaacaataaaaacaaaacaactgggcatgcttgacttaaagtacatctcctttatagaaagaaacttacattcttgacttttctgcagtaccaagttgcctgccagggatacccacccctgcctaaagtcaggtggctaaatttactcaatcctgtagtctgctggtctctcatacaatgctaatacgtcaaactagtactactgatgatgaaggtaatactttccctcttttattatcattttgctttttaaatgttctcaattagttcagtgcctggtcaagagagaaaaaaatcatacattgagatccctcagaaacccacaacacagccaaaatgtgagaatgggtaagtggaaagaatatgcattatcctaactcttttaatacttactacttcagtgcacattgttctgataagaggataaagtaaacacagataaggttaaaaatcacaatttccctgaaaaacattaactgcattaccaaaaatcctataatccctagaaattatcatgtccatttatgattctggcttaattttgaaaaggggagaatgaataataggctattcctactataggatctttgccaatcaacctatgataaactgataaataaataaataaataaataaataatatttaaatgagacaggttactgtcatttaggtcaagagccagaagaagacatgtggttatacatgcttgagaaatctagacaaaatggctctaaggaatagttgattaaaaacttaaaatacaaaaccattctagtattcagttttcgatcagttttaaacttcaactctattacaaggaagtaacttataaagcagatctttcttttttgtttttgctgccaccaaaaaaaatgtggatgtgtggatattaaactcacctgacttcatcatctctctataatccaggatacacataatatactgagctattagcaagatcacaatacatgtttttgaacttcatccacctatatcataataaaaacttgtagagtaggtggggagattggaatcgaaatgccatagctaatttggtaaagaaatgatacacggttctagtatctgttaacagtaaaagttttcccataccaaaaacgccatgttatgtaaatatgcacattgtacttttcattatgcagtccttcaaagggtaataatttgctaatgttatttcaactttctgcaggccttttggtatgaaaagactaaaaattacaggacacaagcattcattaaatggatatattttactctagaaagtaataaaaggaattacaaacatttaatttttctccttttcacttgaagctatttttttaaagaaatttagaacaatatttttattctataattcttgaagaaattgttttttgaaaacaaatccactgtaatacagaactaaagcaaattttagttgataaaataatgtgggctctagtccagatatacatttttttaaaagtgaaaactaagttaatctataaacttgttaagcaagaagatcaagaagcgcaagagcccgaaattgaaatgccttaacaatcagtgaggtgacttaaatcactgaactgggaattatattggacaactggtaaccatggggattttgttacatcaaagtaaaggtcctgtctggagatattgcaggctgtgttgctacagcttcttgagttacttcaaaatagttgaaaactcagcttttatatcaagtttcttaatttttaaaactggctttgtttgctgaatccaagagcacacaaatgagtctgtggtttagtttagcctttggatccaccacttagaaactgttatggtaattgaagtcaggaaggacccagcctctgagatccctgagttgggggatgaagagaaaggaaccaggctactaggtaaactaggtatcctggtaaactctagaccaagcttgtccaacccacagccggagggctgcatgaggcccaaaacggctttgaatgtggcccaacacggctttgaatgtggcccaacacaaatttgtaaactttcttaaaacattatgagaatttcttgcgattttttttttttttttttttttttagttcatcagctatcgctagtgttactgtatttcatgggtgactcaagacaattcttcttccaatgtggcccagggaagccaaaatactggacaccccttgagagggaaggaaagccatccagacacagccgtgatggtgttccagctgaaaaggctgcagagaaggctttcacaactattggcaatttctgatctttggggatatttctgctacagtgtagtaagttacttgtttgattccaccaggataggagtattatcaaaatccacagccaccctcagttcttagaaactcagatgcccttgaatgcaggcatttacagaaaagagaatgagtcatttgtatagatggagctatttactggatgttatcatttttaatgccatagtactctctattttctttcctcttacgttctcattatcaagttttcctttggcacctatttctccagatgctaacagtgaatacaattttcctacccaaaaatttctttcaatttttgggtaggaacaaacagacatgaatataaataacagcaggggtagtttgctcttaaagatgttccccgggtgtttctttcttggaggacgctataattgtccaatttaactctgttagcattttggagaataacagatacatagaacagatatccttatggtagaattatctgagtgcaaatttgtttaacggcaaacatttagtcagtaattcatatggaagctaatattttccatggcactcagacacagacagccagtgaacggagggcacctgccattacattcattcactcaaatacattctatttgaccacactgtcttccttttggtgaggatttgactaagaataacatttctggttcctttggagcactcagtagagacacattatttttttgtttacttattttccttttgggcagttggatcaataggcacatgatcgatttctcccaagactgtgcactcttgggtggaaatgaaattatatagaaagaaaagattcaaataaaaagcaaggaaaagatcccctaagggtacaggggaggggaaaacaaattttctgtctagaagcttaagcatgtttgacacacacacacacaaaaatagagaaaacagtgatatgcagagaaaagatgacatctgttgctcatagtctactgaaaaatgtgtgacaaatatctgtacaacagtcctcatggaggtcaaattccctgtctcttcaaaattccgtttctatgtatcctttatcttatacacttagggaaacagtagtgagttcttatatggttttcctcagaaggaacttcacttccggacatgagctttaattcttctaaaagccgtcagggattcagccatcatgaaaaggtcttcaatcatgcacctcattgggcttctttatatcctgtttttaggagaaagacttgtaatgtcttcctaaatgtgacactagcaatggaaggaacataaactttggaagaggagaagcaagaataccactcattggaatattttttcctctctccacaaatgattgctttttgttgccttcacgagatctttttttaactataatttagggattctcatttcattcaacttctagcctttcagatatattcctgtctacttccatttctattagctaccatctggctctgctgctaccaggattatagtcagttatattggaaataaatatatttgtcattataattttactatggcagctttctgcacctaaacattctgcacacaattgtgcaggtgcacacacacatagacacacacagaaaccccacgttatctcccacccaccctttacgattttctattatgtaatatactctgcttcctccttcaagatttccttaagaagtgaatcagttctggaaggctgaatgatctaagtgtcatcaccactttctcttaattgaatagtatcagccatagccaactacatgacacattcttctgtaagagacaataagttcagttagcggaatcctaacatatatgtaaatgaggggacaattcataggatgccaattgttccacctgctgtaagtttagtgagtggtgcacagtgcttcctctattagggtgttgttagttaaaattctattgccctttccttacgttattttgaaatttacttgcaaatggattataacagttcccaaaatatgaatccaggaacatatgctcattcactaatttgctccagtctcagtggaatttatctaattgtcctcagaatctggccttctcagcctaacttacatgtggctctgcttggcagtgatgaactcagcgtgtgacccattgaacggagggcacctgccattacattcatggcagtggccgactaatgaatattgccagagcaaaaatcatctttaatgatggatctcaaaatacattttcatgtttccagtagcttctgttaaaattcttcattgtcaattgcagattgagaacaagggaacacaagcctcagaagagggtacactaagtggaactgcaattaggaacaagcacagcagacaaaaaggagagtcacggccacctgcagacagcatgtcaggaagaagctgccactgaaaaagttaggaagcaaatgcttggctgacattgcagtaccagcaaatgtacacggatttttccctgtaactatccatcctttattgtaactatcaaattagcaagtgtgttagagagagtgccatgctcccggaaaggggcaatcatttcttcttctctcactcatattcctggttgacagttccctagggggacagtggaagtaaatttagacctgccctgatggaggcgagtcagctcattagccgctgccatcacagcactttcccttcagctcacagatggagacaagggctctttgaaggcgattctgaggcaacttcgcatggaacggcataagtggggatcctgtaaagtgtcgtttccctggaaaccaagtgtaacaaatacgctgttttcatcagttcaggatgcgtgtagttcacacttaaatgctgggtttgtgcagaaatttgcacagtggatgcctgtgttatgatacatgtaagcgagagttcttaaggactgtcagtcggctccttcatggagtcataaaccccctttgaaagagcagcatgttaaaagatgagatatgaatcattccaatgggatgtaagtgtgatgcagagtttctgtacaaaatgcagtattcccttatgcaatttagaaaaaagtatcaattttaattgaattagatcttgttttaacataaagacttatcatgttaatttcaatccccagattcttacttgtgggagcaccagtaatggaattttatcttattaatagcctaagtaacaacaccatcccaatttcatccatacacatttgattcaaaaacacaagtggtatttccaatcaaattaagatatcaggacattttttttaagaggactggcatggttgcttatggttgtaatcccagcgctttgggataccaaggtgggaaggttgcttgagctcaagagtttgagaccatcctgggcagcattgtgagactctgtctctactaacaataaaacttaaaaatttagccagcatggtggcacatgcctgcagtcctagctacttggaaggctgaggccaagggattgcttgggccaaggtatctgaggctgcagtaagccatgattgcaccactgcacttcagcctaggcagcacagtgagaccatctctcaaaaaaaaggaaacaaaaacaaacaaacaaacaaagaaaacaccaaccaaccaaacaacaacaacaacaacaacaaagacaaatgatatcaggggaaattccttagaaaggaattaaaattcaaagggtgattattcaagtacaaaatttcataaaaataagttcctaaacaaaatatagactagtaacatttttacaacagcaacttaaatatccatttgagaaattctccattcatacaacacctccactgtatgaatgctgagccagaaagtagcctaccattacagcttagctcttaattgcttaccatgtcattaataataattcattgttgctaagtttatattttggtatttatggaaaatatcagtgacaccatggacaagcagcctttacactgtttgcgcagttagtactgattttttccatatttcctacttgaaccttcatccattttgagtggcatagtctttattaaaattgtcctaaaactctcaggtccaaggttggtatcatacagaagttaaacatagagagatagaggtattaagaacctcagtcacttatctgtgttcacatgacgagttattaatagagccagttcttcagattttccttcttaccatttaatcaccagtttacgatagactgaaattcaactctacctaattagtctgtacaatcataatggttgatgagttaatgcagacacatgtacttacttaactgcaatttgatctacttaggtttgaaatatagttttgtacagtctagactgtcaggagaatgaaattctttttgtctctggtatatcaaatgtccccttgactctggtgttactggatcgtggcagaatctggtctatggattctccatgcaagtaagctcaagtttttgtttttcagccattagtcacatagttttaaatgtattagaaaaatatgctgaagttgagtgttttttactccactgtgtattactaatgggattttaccaaagagcatgacctctaatcatattaatatttaatcaagcaataaatatgccttgctgcaaagctcaaagccaacagagttctctctggtgatgatttttctattaagctaacaaggatttcttttgctttatctcattactataaaattgggataaatgtctgagtattcaattctcagtaagtgtcttaaagggcttttgactctcctgtccaaataagcaaaatatcccacattgaactttaatatgttttctcaaagctttgtttctttggaaatggcctctaaaacgtggcctatgagataaaggttttgaaataaaaggaagaagaaaagatggtcaattgtaaaatataagtgctaacatcacaaaatattgagaaaaaattgttaaatgagtgttttaaaaaggaagcaatgatgatttatatgatactagggaaagtggcccaaagtaaatgcaatgtgcttagattgtacttagatatttatactgtagaggaaaataggacagggaacatgttacacagtcaccatattgtttcttcctcctgggcacacaaaaataagtaagaaatttaccagctcactccctaacctcctgcagtcatgatggggtaggtacatctggctgagttttagtcaatagttggtgggcagaggtgatgtgaagcaacctccagtcctaattcttacagatcatcctgcaatatcctccagaattctcttccccatctacagtatccttgacagacacctgtttcagatggtgtagttgcagaacagaaatattccctaatagcttagaaatgtgcagtcttacactacaaatacttatgggacacagataacctcctcaaatttcttaaaatcagtttatagactgattccagcagccattgtgaaatcaactaaaacatacaattcttaagtcatctttttgaagatgcttctaatggcatacatattattcatggctgacttcagttttttttcccattgatcagctttcttactgtttttgacttgtttctttttatagttaggaaattatatttatggataattaatatgcttcaatatcaagtagattgtgtgtgtgtgtgttttagccaatgggggtaaagtagaacaagtgttcctcttcctccaggccctagtgtgtcatttgtggcttcagttataaaaaagtagacttcatcaaggactcagggagcaatgctgggcgtcaggatactctgcattgctggttctcaggcgtgtccaggcttaaccattgagagcagagctctactggcctgccttgtgtttcaatagcatgtcaaccccagctggcctgccttgtgttttacatggcatgtcagcccagcatttctgttgctagaaagctttccttttctttcatatttagagggataaggttttaactgttcagcatctgttcttaaaatggcaatatactctctgtgattattttgagaaagccattttgatcgaaatattgggttctctttgctttcatttccctgatagatctctcagctcactctccccagaactgactctgaagagctgacaaagcaataactagttgttacagaggaatttttctctattgtgggtgttatttatttattttgtttattctagtaatgatttcttgtccacttcaatttattagtttcaaaacgagtgaatatagacatagtggaatctttgctatcccttggttaaattctatcccgtgatatcccttgaaagagtaaggaggaggtctctctgtttcatgaggaatttaagcaaggtgctcagaatgaatcacctagaagagtataaagattgctgtagatttcttaagtactagtttcaaacaaataccatcaaaaaaaagagtaattgccaacatgtgtgcccttaactcaatttcctacagaaagaacagctgaaaaaaactattaaaaatccattacctgttgtttaagaaccaaatagcatttttcagaagtttcttatcaagcaattgaatgcagcaggatgatgtacagtgggagtgaggattaggctggtattgacgttttgcttcctaacttaaatgattcactaaattcactaaattagatcaaggaatttaatttcttttcaagcctttatgaattttctctaatatagaaatgatccaagacagaacactcaagaaaattaaacagagacaacaatttagagaaaaaattctgcatagtaccctgtggagggcactcatagaccatcaaacagatgagtgagaatttcttggccaaatctctcagtacctttttcaaggcaaactcagatttgttcgctatatatctacaatatattcaggaagcaagacttgaatggcagagctaagactaaactgaaggcaaccactctttattaaggtcttgtaagcacttttatatacttagaatctagtcttggtgttagttattcggtacgttcagtacctataaatttttaaatctacatctgacatgaacagaactaaatcctaaaggagaagatcaatattaaacctgccacattttaacaggggtcatgttgcatatgacagagataaaaagggctcagggcaatgcagtgtctttcagaacagtgagagacgggctgtccctggagtaatcaaggtcagaaaactgccaggtctttcccttcaaggccagggcagaaagattttctctagctgctgaaaggcaaatgagtgggactcacaggtcagcacaatcactgccagcccacaatccgaacccttttatgactaagcagtagagatgctgaggggtggcttcagaggaggttttagagctaccttcgaaagaacaataaacgaacattcagtttgtgtctgaatgttgttttaagctatttaaataaatgcacaatctaaataaaaattaaagtgcattctagtaataataactttaagacactcaacaagttgagtgctctcaagcttcaccccatttccaagcaaactgtacacatttaaatccctcctctaagcaactgccacacgtaggcgtaatatgattaaagtgaagaaatctatttttttcaggaaagaaaaggaacaaaaataggcagaccaaagatcttatccttttagactactctaaagacaaacaaaaacacaccacagagataagagcattgaggaacatacacgtatacacatagatgtaaaaatttaaggacgatttcatctgtaaggattatgagagagttggtgtttctgggtggagtgtcgtggaggaaggaaagtagcaattataaagttatttttaacatatggaaaattagcaaaaatttcatgatcacttactgaaatgccaccgaattgataaaataaggaaaaagcaaactgaaaaccatctgatgcctagaacattatctacaagtgtttgaaaatttcagaagccagtatgttttttttcagcaatactcatgagtactcttgtaacttgctgggtgctataacttgagaaaatattaagaagaatattcttgaaatttttatttccacattcttctagttctaaaaattaataaaaaatttggtattttaaaaattgctaaagaaaagcttacttagagatttttatcaaactatcagcatctaaaactaacttgtgacaaatggagttgcttacagtgaacaaaatggccagtctcttgtagttatttttatatctgagttgtagattttaatctaccaaatatattgtttctctctctctctttctctatctaaagaacatgtaaatcaatgaaataatagatagcctatattgttatttatttcattaaaatattatggcagggtgaattgttgaagaatgaatgggaaagcctcatcgctctcaggagtgacactaaagagtttgataattagtacttcaaggtcaagtggtaagtaattgatgaagcactgcttgttataatgtttttgacgagaggattaaactgaagtgcacttaattttcttggctgtttaagtgtagttaccacaaaatagacaaaataaggtttcattatgcttttttttaaaaaatgatatgagattgtaaagtgtgataatgcattaagcttttatcttccatcattagtgtgacagtcaaagtaaaggcaaaaagatgatgctgagagccaatgttatccttatgggacacagtgatgcactttagtgtacattaaaacatacctgaaacacttgtcatagttgtcagaccctatttattggagcgctgaaatctgaatcgaagctgcaaaattgaatgaaaaacaactggctacatcagtttatcactgaaaaacaaatggctgtatttgcttctttgcagttccaaacatgagctcaatacaggagactctagagcaccagaaccctgtaaatcatgacatatatgtctgtgccagccgctgataaactgtgcctagctctcccaatgaaagtaacagatagacctctgaaaagcaccgagatgaaaaatcagacaggaaagccacttcttctaatgctaaactttgccaggacagggaggtgcctctagcactgttgtaccgtttcctccaagagaaagtatttgcaaagcttacattttcaaacaatcctaggaatgtatcacttcatattttcaaaagtttcttggagaaagatattttgcagtgtcctacatgaacttgagtgtttgtctctggaacttttaagtttgatttcacttagcgctgcttgcacttcagttgaggccatttttacttgaagcttaattaaagccattgtcctcagggactaatacgcatcaatactcttttccccaaggtccccaagtcatataaggacaccttgaatcattctcagttaatgatacctgccacaagaatattttctcaagatagaaaaattcatattagttaatgtatcatcttaggcacactaccaaatcggttataatgttgcctttcctatttttactaataccttttttccatagtttctggatatagaagctaagtggaaaatattttaaaatatggtttacttttatttagaaattagccaatgatttatttagaaattagtcactattatataaattctgtcattaagaatattatcaaaacatttaaaactgtttttcaattttctcaagataatatagatttaaacagttaacaggtcaatgaaaaggtttgaaactttgtgcttaaaaattaaaaggataaaggaaaatgatgcataatatttatttgcagctcagccaataaaatctgatgaatcacgaaattgccataacaagtttatttctatgttgttttgtagctgcttttttatgcagttttaacctagatgaatcaaatgccatatcacttgttattcttttaaaaagaaccttttcaaattattgcatatatatttaaaaattccttcacttgatatatggttattgtggaatatacttttacatgtatcagttactgtgtttctagtcacaaataatagaaattctaatcgaaactttacttaaacaatagcatggatttattattctaggtaattacaaagccttttcttttctgtcttcagtgatggtgtcagctttatccaaagcctggacttaaagggaaaatggtaacagtgtttccagattttatgtctgtgtgccacacagttcagtagaatttgtcccccagaagcctccagcactagccttgcttaggctgattagctgaattaaatcccatgcttatcgatatatatggctccgattatgaaattcagctaattattttaggtctcagccacatgccccactccttgcaccaaacggggtcagtttcttaaaaaattagaggttcaataaggaaggcttcaagacctaagtgaaaactagggtagttggtagtcacctaagtaactattgaggtagtctctttgaggtagagactgcatttaggtgaagcagccaaaaaataaaatgaaataaaataaaatagcccaattagacttacccacctctttatctctctctctctttctctctctccctctgtgtatgtgtttgtgtgtgtgtccagaactctcttttaatgagaaaaaaaaatgactagaaaattacatggaaatctgcttctcctaatctcgcaattgcttaaccatagcaatccttcctgctttttctggcaataaactttttatttgacaattgtttagatgtatagagaagttgtgaagatattttaattatttgatgtatctcacatctagatttccttactgtttatctgttaaattactgcagtatatttatcaggattaatgaacaattatagatacattattaataattaaagcccagatttattcagatttctttagttttcactaaatgttctttttgttttttaatgcagtcattgtgtctacttaagttccacgtggctctgatagtttctcggactttcccttctttgggtaaacttgatagctttgaggaatcaaatgtttttagaatgtccctcaattagcacttgtctgatttttccctcatgattagattagggattttaagagaaagaacacagaggtaaggtcccattgtcatcacattatatcaaggttaaacactgtataacataacgtttgatgttaaagttgatcatccagcagaggtaacatttgttagttttctccactgtaaattgacgttttccctcctatttttcacactgcattcttcggaaagaagtcactatgtgcaatccatatttaaggagtggggttatgcttcatctcctcaaggatagagtatctacataaattatttgggatactgcagagatttgtctattttcctccaatcatttgcttatttaatcattcatataattatggattcattaatatttactttaaactttgggttataatccaacactactttatttattttattgtataaattgttctacctttggccagcggcagctggttcagttgactcctgtttctcattgccatttccctggcccgctgttttcttttttaatttctagtctacctggaattgtaatcattgccttagagtgatgattctcaaatgtggtcccctgacatttgacatctgaggacttgttagacatacaggcctcatcccaaatcatcctgctgaatcagaatctctgggtatggtacctagaaatctgtcctttaataaaccctgacagtgatccttatgcaaggaaaagttccaagaccagtgccctaaagcatcatgagaagaaaagaagaaaatttttaaaagcgtaaaaattggacacataataattgtacgtattcatggggtacatagtgatttttttttttttttttgaggcagagtctcgcttagtcacccaggctgaagtgcagtggtgagatctcagctcactgcagccaccgtctcccaggttcagcaattctcccatctcagcctcccgagtagctgggattacaggcacctgccatcatgcatggctaatttttgtatttttagtagagacgggtttcaccatgttggccaggctggtcttgaactcctgacctcaggagatccgcccgcctcggcctcccaaagagctaggattacaggtgtgagccactgtacctggcctacatagtgatattttgatatatacaatgtatagtgatcaaatcagggttattaacatatccatcacctcaaatgtttatcatttttttgtgtgttgggaacattcaaaatcctctcgtagctatttaaaaatataaattatattgttgtctatagtcaccctacagtgctagaaaatactagaacttatttctcctatctagctgtaactttgtaacctttaaccaacctctccctattcctctgcccctcctcccctttccagcctttaactcattccacagcaaataattgaaaaataaagtaaataattcactcatatgcactcagcaaatacattatattctggatttaatgtgctgatttctagtctgaagccatttatatgatcaataatcttttttcttttctttgaaggactttcttcagttttaaattaattatctggttacttttttagaagtggcattttaaatccatttatgtttattcaaaattctcttaactttgaacatcattctaaaatctctaacaattctaaattctctcaatcttggatattcaaaattcaaacattcaaacatttttttatcatgggttgtatttcaatttcatataattatttgtgagaacgaagtcagtaaaatatatctgagaccccattgaataaaccaagtgatcagacagcttctctgaaaatgaatattaaactactatctttgttaaccttgaacttactggctctgtgtgtgtgtgtgtgtgtgtgtgtgtgtgcatatatatgtgtgtgtgtcgttggtccctcaccaaagcaaattaatatcacaagaaaaatgtggagttgcattcagttttggaatagtgttgaaaagaatatcaacttataggaaaacttttctattctgagtcagatgaaactcatggtcttgtatattctaagattctttaaaatactcatttcagttacgtataatatttgatttggaatcactatatattttcaatttaagagatatttttagtggtttcttcataaactttttcagtttttaaaatattaatatatagatatgacagaaataatttacaatgacatttactttaaactgaaaatatttctcccatctctaaaaaaagcttcaaatatgtgtcacctgctccatctgcaaaggccattgctaacttaccacagtaccaagatacaatttacaaaattatataagtacacacacacagacacacacaaaactgtaattttccaaaacactgaacctgtcctttagcctgtcatttttatactactattttcatatttcatatgctagttgtaaagtacaacgtaatggcttcatgagggatttatatttctacgaaggacaaaattggtggcattaggttaagtcttttctgttaccaatatgtgctttgactagttttttatgtacacatgtttaaacaagtggaataatacacacttcaaaaatgcatctttgagttgagcttcattctacaaaatctgtaagccttatgtcatgaagaagaggatcctagcatttattaggtctgtttcctattgtgtgaatcacacctcccaacctcaaagtattccatatgaaaacacagctgtcactgccaaggacttcagtgcttccagttttaggctggataatgtctgtctgccaaagcaatacatcagtcattacacaagatgactcacaccatccgtgtcttggcaagaatatacatattgctaacaattgcatttatctggaaagctttaagcattaatgcatccttatttttattttaaccccaaattctcaaccataggaatattgtcaacttttctcacagctttacaataaatcctgggtagcttttttaaaaactacaaccagaggataaatgttattctttaataatgtttgtatgatttgtccctcaatatctaaaatctaacattactgccaaagtgtaattctcatcatagtgtgtctgtagttgcatctcctttcgtgtctatttgtggttcaaaacatgtagaatccattattagagtacacattttaattttaaaaacatgaacaaaaaaaaagcttgcatgtaaataataaatctgacacaccatggtaggcattattttaaaactaataaatttacaacttacaaaattacataacaatatatatactgagcataatagatatattgtgtactacatttcaaatattatatcatttaaaagatatataacatataaatgatccctgcagtagtttaaaataatacttagtttaaaatggcaatgaatgatttcagaacataaattattcatcaaaggacatttaatagtttagttcatctggtataaaattgacaaggtagtcattaatgagctcaaattattcagtaaatgttaatacccagaaccaaataatggcatttatttcttaggaattactgcctaatctactggataatatttttaaaggtgaactatgtcctgctcttttccatgcacacacactcacacatgcacacatacacaaacacatatggcttgaaattgctagaaaaatatgagcttaattatatgttttaaatttttaaatatgtattaaattatttagaataatcactgtgagaggacatgtatgttgaagtctcaaaccaataaactctaccagtaaaatctgtaatgaggacataaactgttaatttttggggaaagaataaaaaataaaataggaataagaaaaaacattgaagattgccatatacatgaatgtactaagagcactaacaaacattaaaggctctctgtttagtggccaagagatactggttttatagaaaggacaaaacaatacagaatggtcagatatatgccgatatatgtggttcaaatataaaaactatttactagttttcaaattttacaagtaagttatacgttagaaaaatgataattttataacagaagggaagtgattatctccaggaaaaacctgaagatataatttaaaatgttttagagtggaagtggtgagagaaagtggttacatactcttctttcaaaatgaaaaaagttaagaatgtattgagagttgatggaacaaaaatagaggatgcacatataacatatcaatgctatctcaataaaaataacaatgtaagaattaatattacatggaaagtaaggattttaaaagtgagccaattcccattttgctaggaggtcacagcatatttgaggtggagaacaatatggaggttccacaaagaaaaataaaaatagaactactatagatccagcaatcccactgttgggtatacattttaaaaaacaaacaaacaaagaaacaacaacaaaacagtgtatcggcgggtgcggtggctcatgcctgtaatcccagcactttgggaggccaaggcgggtgtatcacctgaggttgagagtatgagaccagcctggctaatatggtgaaaccccatctctactaaaaatacaaaaaattagccgggcatggttgtgggtgcctgtaatctcagctacttgggaggctgaggcaggagaattgcttgaacctgggaggcagaggttgcagtgagccaagatcgtgccactgcactccagcctggacaacaagagtgaaactttgtctaaaaaaaaaaaaaaacagagagagagagagatacctgcattcccatgtttactgcagcactattcacaatagccaagatacagaatcaacctgagtgtctatcaagaaattaatggataaagaaaatgtggcgtatatagacacattttatacaatggaatattatttcaccacaaaaaagaatgaaattctgtccatttggcacaacctgaatgaaactggaggacatgacattaggtgaaataaaccagacacagaaacacaaatattgcagattctccctcatatgtgagaactaaaacaacaacaaaatgaactcatggagatagatagtggaataatggttgacagaggctgggaagggaagtagggagtggggtgataaactggagatagttaataggtacaaaaatacagtcggatgagatgaacaagatctagcattcagtgatgtaatagagtgactacagttagcaataatttattgtatatttttaaataactacaagagttgaattgaaatgtttctaacataaaaaaaataacaaagccttaaggtgatggataccccggtttccctgatctgatcattacacattgtaggtccttaaaacattacatatccttcataaatatataaaattactgtgttatcatagttaaaaactaaaaaattaaaaaaataaagtgctgaacaacaaaaacaaaaagaatgtatgtaaccaccagaagaaacagaaaataaactatgataatagttgccccctaagtgtaggcctaatggttagagcatggggccaaccacagatacttttcatcatgagctattttgaacttctcaattctttcatccatgggcatgaataattgtcttcacatttttaaatgaaaccaaaaatcattgcaaaacaaaaataacatggtacacatataattattcataatggctgaaacattgagaaaaattaacaacaaaaaaattaaactaaaaataattagcaggggagatggcattaaagacaaagtaatggataataattaaaagcttgggctttggactcaatcttacctaccttcaagtaattattttctatcagctattgagaaataaaaatgaaatcctaagccctgcaaagacacagactctctctttgccaaggaaaccccagagacaccttcaaaactgagttgttggccatgacaggatgggggatgtccgacacagctgattttagctcctccctcgctacccactattggctttcttccctaaaggctaaaaagaaaccagcgctttgcagagactggctccacttctgatatcaaccaaacacctgatggtaccccttctttttgtggttataataaaacaaccaaccagccttccttccttataagacagcactgaccatgaaggatgcatggcaagagtgtttgggtcctcttcttaaacttttgataacagtgggtcaaagactccacccttggataatgctaacactgccagtttttgaacttgggatccgtggagagaggcatgaaactcaactgcgcatgcacgtttctcctttcataaatattcataactcctcctatagcttaatgagtatgtatatttggtcaccccattcagcataaattcttgtcttattcttttcacacttgaagtgactgtgttcagattccggctggccctgtgcttcccagcctgtttgccaccctgcaggctgcaaacccttgatgggaaataaagctttcctttccaaacgtatgaacctcatcattctttagttgacactgtgtaaccttgggaaagttacttaacctatggagacgagggttctgatttgtaaaatcgtaataataatactccattctcatgaagctgttcatggcacgatgggataatacatacataggctcttaataatgtcgtaaacagtactaaagaaactatgaaatagtaagtcaaatatagacttaataagacttataaccagtaattaaaaaaattacaacagaaaaacatctctgttttcattaaataagcaaatgcagaaatcccaagaatgcacctttgttaatgagagctgaatgtcctcagttacagatgtaattttaaaatctgggacaaaactatgtaccatgtattgttctttaaatcagatagatagatgaaaataacatatttgaaatttatattgcaaaagttaactgaaaaagagatagaaacttgatataattatagccataggaaaaaccatgatctttaagacttggctgcaaaaaagacacaagaacagatagttcgccagtcagttttaccaaatttccagagaagagtttatccctatgctattgagcatggagaatgtttcaaaaagaggcccatttatttttacaaaagactcaaaaatattttgtatctttattcacaagtaagaataacagttctcatatcttttcatttctttcttctttttctaatctttcacctctctcccgtcttcatgtcctcctccttctattgattcttttcatttaaatatgtttcgcagatttttagaggattaataaaacttaaaaaaaaattaacactgtttttttaacttggtgaacctttccatttcttatttggtgaatggcctgaacttctactttgatagcatgcataccttttttttaacttgatgtttaataaaagttttgtttttcttttttctttagctatgcagagtattaagttcagttctcaagagagctgtaatcaaacacaacctgatgttttacttaatttttctttcctcttttcctgataaaatgtttaatttctatatggtaattatttttatggttactatgttccatgttatgtgttatgtcttccctaagaatgtgaataatatgtgatatatttcctattactttacttttttatatttaaaattttattatctgaaatgttttacatataaaatgagttaagaaacttttttttaaatagatagtcattgtcctaatgacaatttctttttttcttttttttttttcttttgagtcagtgtctcgctctcttgcctacactggagtgcagcagcgtgatttgtctcagctcactgtaacctcaaccttccaggctcaagtgatccttctacttcagcttcttgagtacctgggacttacaggcatgtaccaccaagtccagctaatttttatttttatagaaatgagttcttgccgtattttccaggctggtctcgaactcctgggctcaagcgattctcccacataagcctcccaaagtgctaggattacaggcataagccagggtgcctggtccctgatggcaatttctgaagcaaataatccctttagaatggattttaagtaagatcctcatggcactcctgattcccatacatgcctacattaggaccttagctctctcatctggtttctgttagtgtagtaatgtgtattatcacagctttatcttctgctaagctttcccttattacttttcttttacagcatttaattaattttacaggttttattccacataatttttaaataagtagtcaaagtatttgaaagctccagtgaatttttgattaaaatattttagaattatattattttgggaaaacttttaaatttataacatacaatcatgtaaccaaagaacatgacatatctctgcattaaggtcttctttgatactggagtcactgtatttatagagttataggtattgattgtatcctgaatgatagatgcaacagaggcgtctttggagaaacagcaaggagaaaaagcaagtgaaacactattaggacatattcataccatacatataatggaaagcaccctagactgttacatgtcatgccatgaaatttcctttttcaaaattctttctggatgaataaggcagactaagggtcaagttattctgttagtagatgatgccttaagtattatatacctttggtgggaaaagtaatagagacgcttaaaacttgggtctatactagagcagtaggtacttccttacatctactgtaccttaagtcattttatagtttaataagctatgaaaaatttagtaacagatattctagaaacacacttatctgtgcttctgctatcatcaaatgatacttatgcaataggcaacgatgatgccttcaagttatccctataaattatatttacattttgatatcatcctaattggtaggaggtaattcatatatctgtgcaccatgatataaaaataaaatgtggttttccctactgaacaaaagcaagtttttcaaatgtgttttatagaattaatgcattacagacagaaaggaaaaaatggattgggtaggtcagttattgtaaaactaaagtagttaagtttcatatttcttgacaaagaaactttgctgggtgctggtggaacaaggacagaaataatttaattcagctggcacattctgcgtctgcaaataaaccaaaacatacgcacagcgctccacattgttgcctgtcatcctattatatgtctttatcatctctttcttgaactacaataatctagctgggtcctttgcttccacttgtccctttataattcttcagacagtgaccttttttaaaacaaatcagaccatgttatttttttgtttaaagttttctatgtcctttcaataaaaaccaacctctgatcatggccccagttttctgcacaaatgttctagtccacttgataatagtctttcttaacttcttttatcattcttggcttaaggatctttttgtatgtttttttttattccaacttgactttttcctctagatctttgttaagctgatttcttctaattatttagattcctgcttaaaatatcaccttctcagagaaatgtttcttgtcagctatctaagttgcttccccctttttactgtcattcggaagtagaacacagtattttagtttcttggtagcatttcctaggtcataatttttttatttactaatatttttattctcactggaaatattcaccatgatactagaaaccttgcctatatttttaccttcttactctcagtctataggatgaaatctagtatgtcatacaatctttgcttattaaatatttgaaagaataaatgcagaaatcctctgtcatcagaggtgatcagtttttctacgtaatctaaaaggtgtaaaaagatcaacaaatttattcaattaactattatgttttgaactctaatggaataaacacattcttaatcattccttgaactttatactaatgtatattaaagttttagtagtcaatgtgtattttggtagcttatattaatatttagcatattaccaatattttctaatttatctggttctgtcatcatttattcctgaaaagcagctaatacttctcaagctggctatgagccaatgcatttaaaagaggagactctcacatctctttattcctgatttcaaatgtatatacacacatatatatttttaaaaattatattatattaaaaaattcaaaggaaataattgttcatttgaattttttaatattgttgatcttttttcaaaatgtttttctttccaaatcactttttacttaggctccacttatagtccctaatatccacccagactccttttatagctatgaaccaaagtcttcagaatatctcaataattttaccatgttttttattgtagtctctcttcttcctatttctcaatctgttctaaatcacaacctatttgtaccaatttcttattcaatcacatttatgtcttcctttgcttacagggacaattttctatacataaggatgatattcaaaatctcttcacctaattggtcttctctaccaaactaaacatcactatttttcaaacgattctctcctattgaccaccgaacacatcatatctagaattactacaaaacaatcctaataaattggtcttccttctttgaatagcaataatcccaattactggattggaaaatttaaattatatgttacaatgccttattatctcactctttatatgttttcttccccagctacatgaaaagctattacacagctattattttgacttatacttgttttgctgctttttttttttttttttgagacggtgtctcgctctgtcgctcaggctggagtgcagtggcgtgatcttagctcactcttgttttgcattttttatgtgactagcacacaatgcttacaactctagccacttaattcattttgcttcaaagtgtgaatgaatacaatttattaccatgtaaactggctaaataatcactcataatttttgtcctcataagggacaaacagctataatataaagttacgatatttcccatatgtccttgaagtgaaggtggccatgtgactcaacttggcccaaaggagcaatatggagagatagtggaaataatatgtcccgcctcaaggcaaggctcacataaacgtatgcatgattttcaaactcttttccttcctagcaagcttgatgttaatgataatgataaatttttggaagccatacattaaagatgaagaaaaatatggaaatagctcaagttacctccccaacattaaaacaaacaaccctcagagaaaattcaccagttaacgaggaactagaattttgaacgcactgtgaaaaaaactaaaacaaaagcaaacaaacaaataaaacttctaccaagtttgagccattatatgtatttttttgttgttgcaacagggaacattatcataactaatatactacattcctaaccaggttaacctgtagctaccagtacttataaaattatttctattttactactgaatgtttgaaggcatttgccaaaaggtgacacttccaagcctgaatatgtaaattttacctgactattgcatttctccattcaccaaaattaattaatatttagtatgtggacaaccaatatctaaaacgatttgcatttaataaataaagtgacatcattttaatgtatgaattcctttataagtagtacaaaacatgtgctcataatgcaaacttaagaaaattaataatttttgtactataaaaaaatgttgaaccatgttttccaaaatgaatgactcctaaaattcccaaaaacagggatatattttttctcacatcttttatacattgtcttttttatgttttaaacattgcaaacaaagagaatgatcaggaaaatttatttgggagtcttagtaactgacataatttaatgtggattgaaaaacaatgtatgaagtcaccagtgaatggaggatttatctatgtggatatacatggaatccttacagtccttaatgttttaagtgttatgcagtaatctcaaagagagaaactcatttattttttggtgtaatggaataattatttaaatttcctcagctactgctgaaattttgattaaaattcaccttttccacacattttaatatagaaaacatagatattatttaaatagaaaggactggactcctgtcacggacttttcctaaaaacaatctttaacctcctttctacccttctccctgcctcctgataccaagtttacataacgaaagtcaactaaatagttccagtattcaacatctgcttttttccatttgtttcttactatgcatactttgcccacaagtgtttcagacaaactgtactctattcttttcttgtttctggtcatttgttcacaaagtccactttacctagtatgccctctgtaatttctcctatttaaaatccaccaacccctttaaatacaactaaaatgcaaaaatgcatgaaaaggctttttcctttatatctaaagatatcttattctaccctgtgctcccaatgtcctttgggtttccattacagtctttaattcatattgcctcatgtgatacacatttgtgtacacgcatttcttagaatggcaatcatgaagggctcgccatttatgttctgtagcatgtgacatatattctattgataattattagttttatattagtttttttcctttaatttattccttaaccaaagattaatgttgttgtttttttcttctgcacgtcttcctagcaagttataatttccaaactggacatggtgatggacacttgtggtcccagctactcaagaggctgagacaggaagatggcttgagcccaggagttccagcctactgtgagctatgactgctacactgcattccagcatgggtgacagagctagaccccatcttttaaaaaaagagttataattttcaaataaatctacctttatgatttcacttaccccaaactaaaagagtatgtattgaagtttcttagagatgaaacacttatcatgctatttcttatgatctcattctggtatgttttcataatacatgcaatatctatttttcaaaagatgatatctgtataatctcaaaattctatgattttagtaatctggtaatactataaaaaatttatcccattcctactcaattgtacagtaggaaaaataaaaatcagtctcattttatataacaagtattacattagtttttgaagacatagataactaatgaaagatactttaagattatataatttgttataaagaagtaagtatttgttttattttaaaagcaacccatacttagggaagtcagagacgagaagctcctactatagaaggtggaattgtattaaatttttttgctgaagaatcaaatatatacagaaaagctaacaaatcagtagttacattttggtaaaatttcagaaagtgaagatgcttttggagcactgctcagatccaaagatttttactgacacccaactccaatgactgattactacctacccccttccttaatagtaaccatgctcctgaacgatcaccacagactagttttttttcaaataactttatataaatgagatgaaataatacagattattcatctctggtttgtttagcattacattttgtttgtgcaatttgcctatatttgcatagagcggtaattggttcattgtgattgccacattaacagttgatgaatgtttaacttgttttcagtttgaagctgttatgaataaagtgcaataaacatgttttatacgtgttttgtaactataagcaagcatttatgttgggtgcaactttgagagcttaagttttagctcttcttttgtgcatacatcggtattcaattgtatttttaattcacatgtgatctctaatgagtgagactgcataccttttcatgtgttcaggtaaataccttagacagtccgaggttgaccgtactaatcactgagatcgtttcttctacctgaagaatttgctttagtattttgtttactgtggggattctgctgactacttatttcagttattacttgccaaatataactgtctttggtctgtattattttcattagacatgtaactctagggcatcaacatttttttcatctaagcactttgaagataattttcaatgatcatgtggcttcttttttttcttctttaaaattgtttaaatttaaaaattgttttctgtctttagttaagttttgtttttttgataacttagtggtcaatttaactttaacctacaattttaaattttaggtgttataatatccattttggctctgaaaacttttaatgttttctccgtctttcatttccagcaataatgttatgttatgctatgtatgttatgttcatttgaggcttttttcatagttatttgctttgtattgtaattgcttgtgaaaactgtgacttaacatttttcaccagttttgagagtcgttgccattttctccttatagtgcttcagctccatttattcttttttctttttgcaatttcaattacttatattttaaacccttcactatcttccgtgtatcttgtatatttttttcttctatttctatcctttatctggagattttcactcactctattgccaagtttataactctttttaattctgtcaaatatgttgaaaccagctcacttgttttatttttcaatggataatttccattatgttctctttaaagcttttatttctctttcaaaactcaccatgttcatattactttcttgcacacacatatagttatttaaaggcctataaaaataatttcaatatatgaattctctatagatatgtttatattgccaaaatttttgcattgtttttgatcaattcttatcttcttttatttaattttaaaaaccaaatggcagatattttgtatgaaaaactattaatatagatttattccctaaatagtaatattttattccacaacttgttgttttgtttgagtctaccatttagttggagggtatatcaccagattttaatcttgcctttacttcttgtatttattgatctatacccagttcagctggcccctagggttcataccgtcatgcacaattgaaagtatatgttaattaccagagaccatcatccttggtggatccttaccttcagtttttatttgtcaagcactataaacttttcagtatatctgttcagcttcccatcctttcctccatagctttgggattgacaaatactgtaatgtggagaacctagaacactggtttgacatccatgggcttttcttctctctgggaatgtgcttcccttccccttcaaggccatgtagctttcataactctccaatgcgttgaaacagattttacagatgtatgtgcttttttttttctttttgtacagattttatagctcccacgtgggaatgtggtttttgaaacataacatctgcaccatcactttgtacaatttcctatacacattaaatacctgtaaataaaataaaagatagcaccatttttagaaatagataacaaatgaaaagagcagtaatatattataatagattgatcctgattaggatgtgttttatttatactgtccattaataattttgaattagatatgcaaaacaattaccaaaattatatacaacattagagagcacttttacttaatatatctatctatttcttggtcactgatcttagcataataacttattattgatttttattactactcacataaattttatttcattaatgtgttaagtattgattttgcctaaatagtttttaaggtaaagcattcagtaagcaatctgctgatacaaaagaatattaaattttttatactctacttaatgttctttatgtactattttcatacatattgtagtttttaaccttaattatattctttgagcattaaaatctcatatgataataattaaaaaaaatttctgtctctgattaatttatctactttgtcataaaagttactagatgattatacaattgttttgagacttttggaattagtcccaaaggatatattctttttcacctcaaaacatgcccaaagtataaaaaggagatcttttctttttaaattcagattgctgctctccttagtacatcatctaaatcattacagatttaacaaattgttctgagaacaaaatctattgaacaccacataataaatttctgaccataaattgttgatgtagagaaaaaagatgcttagcagaccttagtttagtatagtatttgtgccaggaattgtactaaggttttgaaattgcactggtgaaaatacatgattcttctaagcaaggaactcgctgtctggcagatgtaaatacatgtaaaccaatatgtaacattgccttgtggaggctaaagcaactccatcttggatgttaatcggccatgttgactgtttattaaccccagttctggggagccctctaagatctccagtttatccattgttccttgtgtaagagcaggtgttacaataattcttggccttaagtcaaacaaccttgatgttattgtactttagttgtcatacacatcccttctgaatcatgtatacatttacatatggtagataagccctgagttttgggggcaggggataatggcatggagatccaccatcttgtctcacctgctgccagacacagacataacttctgttcataagtccctgttaaatgttttttttttttctcctgagaaactggctatgtcagcctttttttcttgcatttttatcttcctcggactttggggtaagatctgcccattgatgaacaataattaagaaagtattatatgttacatggcacctgtacattgaatagtgaattctcagtattttgagttcactaaaagagaaaactcttgacacttgtagaagaaattatgctggaagggtaagtctgctgatgtcagatgataaagagtcttaaatggcacaaaacacagtattttcttctacatttatacccttttccctaatgcatggctttaaatatcatttatatgtttataacaaccaagtatagactcgaaaccttgattttttattgatctttaataagctatatgtcaagggagagagtcgatagtattttatgagacattggttatgataagatattggaagagtccatgagaacctgacatttctgctaatatatatgagtggatttgggaatctgctcataataataacagtattaatactattaatattaacattaactaacatttattgaatctgaattttgatttattcaaaacgtggtcacagatttaaacaatactataagataggcattatcttcccagtagtatagataaaaatttggtagcacagagaaatccatagtaaatgagatttaagactatgaatagcagaattgttactggaaaggtggtctcagtccagatttcaagagagggttcttggatcgcatgcaggaaggaattcaaggtgaatcacagagagcagtgagaagagattttatagaaagcaactctgtcacagagtatggcatcctcagaaagcgagtggaggaacacattgtctttttttgttgttgttgtttgtttttttgtttttctgatgttgggtcttgtctatgcaaaaactaaactaaactgtaactatacaaggatgagtagacagcatgacaaaatgtattattctattgatttaaagaaaactatccttgacattttagtgtgtaagtacatcaaacataactgtcattattttgcaagcatatattgttatgggtattgggacatctggacttttcttttgttgtaggtgtctgttcttgtaggtatctttggactgtttcctcagctataaaaatcttatgaccatgagttgtcataagaatgtggcaaggaatttaacttgctagttttaagatgaagttgattttaaaatggtgtcactctggttcgccttggcttctgcttccctaatggagtcagaattcaaacttcagaaacgtctttctgaagtaggagcatgtattgtgaaatgtggagaaaatgtaatgaattgactttcgaacattttgattttaagaaggatttcgtacacccaaatgaggtaaagaggctattttctgaagctctttaaaatgatccaacatagacatttgtccttaaatttcacatgaaggtcaggtggaatgctctgtgtttgagatggctgaggttaatagtgtgtgaaggataataaagagggcaagtatagaaccttggaaaacaaacgttttataagcagttataggaaaacaagcaaatgaaggagaaggaaagagtttaaaatgtaggaggaaaattaaaatctgctttgacatggaaatcaagaaaagtgttccaaataattggagatagtcaataatgttaatgccatagaaaggttaagggagatttttaatgtgggctataaaattcaatgttattggattctgccttctctacaccctcagccaaagaaaacatctctctctggtgctaaaaaactttcacaattttcatccaacctcatctcgcttggattacggcaagaataatctataatactgtcataaattattaataatgtctcatctgattattaccatttggaactaaattggtgaagttacaaaatatttccagatataattttactttgttaaggaaatttctaaaaacatttagttatagactaactttactcttctcagtcaaaacttactaaaggtacaacaatagtgaaaatattaatataaacactcatagaaatgtattttgatggaatcagaggtaacattttaactcttacttatcctgaacccatattcccctaccttcttaaagattctctgtgtcctcttggaagccatagtcctcattaattaccaatgaatatttgaagtcactctaacacatatttattttgacaatgttccgatataaatgggattgaggaacttccagaaagcatttgaaattttttcatactgagtttcacacatccacaaatgtgtctgatagactggaaaagttctaatagaatcaactctgcaggaaggaaagctgggatactgaaatgtaaattattcagaaagaggcaggaaactgactgagtcatccatagtcagaaaccaaggggcaatgattccaggagcaatgtgagtccatgtgaaaattgttttgttaccatgtcacaaccatatcaaaacacatagactgcgaagatctgggaaaacttatacttccatttagagtagaaaaaaattttccatgtgttttctaatgttttcaagccatgtaaatatgcccagtctttttgtttcctagaaagaatagattatctttagaggagaatagtttccatacagcactgaactctgtcgattaatgcaatcatacattgttattactaaaacctacaccaatctatctgaaaacattgtggtttaattttattcttttgaatgcagtacatgagcttcttcagatatcgatttcaataacaggtagattatacattgtaaatgaaaatgaaatatctgatccacactctaatgtaggtacccggttagggtaccttagatagggtatctagaattttcctcagaagtatttctagagctcctaaacctcaggaaaattggctgaaccatttctcatccccaatcaaacacaagttctagaatgacccaagcttttctgaattaagtagactgtaatatttttttctatgtttggttgttgactactgacttctattatcagagtgctgctggattggccatttacaatttctactgctcttgttcttttggtcttcacatttcttttttaattctttcgtcttctggcactttggactgaagaaaaaaaagtaaaagaagaatataggcaactttcattgtctacaaatttgggcagccaaatttttactgcctatgtactgaaaagaatctttccttttacctgtggcacaatgagaatttctgcattatgctaaaacattgcaaactgccagcagctcaattatatatacttttatagttcattacccaaaccatctctctccctgagaaatcctgaaatttagctatgcctcattgattcacagtagatatgccactctggatgtagttttttcaaaaggaaaaaaaagtgtacagaattaaaaacaactgcactcatttacatatatgctactctgtgatcttgtctgttactttattgcactgaagtttctgttagcccattgagtgctgtcatatttgtttgaagagctttctaaaatcaagttcagaatctgatctctgtgtggaacaactggccttcttctaagcctaccctattcatatctgcaatttgttgagcagacagaagctctaaccccacaggaaagtttcctgaattttatgatcatcatatttataactatgtgcccttgtgcttgatagaagcatggggatgtatcagaacataatggttatcactagaggatactatcacattaccccaataatgaaggtttctcttgtatcttgaatgcatgtaaggacaaacattatcattcatgttactatgattattatagtaggaattttactcaactgcaacctggaggagtgattcacctattcttcatcttcttttgtattttacacagttgtgtctgtcatggctccttttaaaggacatacatataattcaaaaaattttatatcacacataatcccggatgtttgacttaccatccaccagtggacacctggggcatccaatatccacctataattttgctgtaggaatcattaatcatcttctatcacacagaatattccaactggtttaatgaaaagtttatcattgattattacccacaactagtcacagaagttatctttgttaatatctctgtagcacagatgaacatatctcaatggaggtatcaggcatgcaggaggaagcatgtacatagaaaatcattcaatgaccactaagttggttttaatttaatggaaactattttaagaaaaataattttgcaaaaatcccagttatctttgatatagctttctgacagactatttttgtttcttagtataccctctaaaaaatactggaaaaaaactgtcaaaataatttcagggcttttttttttttttgcacaaaatgagcaaagcagtagtgtagatttctgataaatatatttaaattgtgttaaagtcttcagttcaatgaagattcatgttattaaaattggcttaacatttgctaacagaaccataataaagaaatggaatttttctttattttattaacaaaagctaaacaatttgaccaaaggattcatttaaaatgaatagtgctcaaattcctactcatactctgtggatcaaaatagtatattatgttcttcattacatcaagttgaaagtgtgtactttaaaaatatttaaaccagtacattttaaataatgaaatattaatttccaaatattgggcagatgatgcaatagtttttatgccatatacttttctttctatctgaaactcttgaatatttacatgttgcttaaactgtttcttttcttattaaaagttaagtgttgttttgaataattataaataattttaggtgtgaacaattatgctttgcttgttttatttaagtctatttaattcaatttaaaatgtattaaattaaaatccattaaaattagttgcattaaaatttaaatttagtaaaattaaacctattcaatataatatcataggaatatgaaacatcaatatgcaaaaacaaacaaacaaaaaacaagcaataaacctgtttctcttgaaatacatgagtatacaatctgggggctagataatcaagaaagctcactaattaagaaattgaaataggatttcttgtagaactaaaagtgccatttaactcaaccaggatcccagtaaaagatccaaaaagtactctgttgtaggctaattatctttctcaatatgagatggcacaggtctcactggaaacaattaggctaaaaaatgttcatttgtaagttcctgtttctactcacatatatttgatatatttgaatgtacaatttttgaaattttagaaaaactactacatttaggaaaatacacatttttaatgggaaactgaaacaaaatattaaacatcatcataatgtattttaatatcataaaaactttaagctttcgtgagggagtttctgtagggagaaaattaatctgcctttcttttaccttccactttgtaaacttcattacaaggcttgttaattcaaggaaaaatgttcattatttttagcctttaaagcttaaaagtacaattgagaatcattcactacaggcacatcattttccactgactgatcgctgtctgctttcaaagaacaatcatttgtaatcttatgatatgatggtgagtaatcaccatcttaaagcgatttctttcctattaacctttctgttaactccacaatttgtttacaacaaaaacaaatcagtcaacacttttgtaattttcattagcagcacagcttttctctctgattcaaaaacaaaatccttggttgatgtgttcatgaaattctgactttctttcctggagtctctttgcagtattaaaaacagcatgggtgagtctttttaaaaagatttggaatctgagacaaatcaaaacgagagttctattatccctaatatgctcttgagaacagtgatcagattccttagctgagtcagtttcagcactcaagttttacatgtgtgtggctgctctgaaaaccacagagatattctgtgaaaccttttctactttgagaaaaaaacaggagtcatatgcaacggctccagaaattaataggtcttgaacccattttgttttagataaaaattgagtaaatacagaataatttttctttcttttttatcttttctttgttgttgttgttgtttttgttgttgctccttatccttggcataaggagttggtacattaatattgttttaacacaaagatatacaggtttattgtctggaaattatgtatgcagcttcaatttattttataaaacatctgtgtatgtgtgatatacaaagaattacagttagccctagttcacccaatgcaaaccacataacattattttttcctctcactgcataacctaccattaattttattaatgagttaaatcttcaaataacagaaagtccttggataatgacaaaggtcaactcctctgtgagctgggcatttaaaaatatttttaaaaggtcaaactaatttaaaacactagtctatacccttcagctacgttgatccacaactatttgtaccattgtttgttgaagtgcagagtacactctctaataaaaagatggaaaacaaaacaatgacagtcacagccagaggtcaatactgaaaagatttttaaaaattctattaataaagctaacagtatatgatttgagtaaatggtgacaggcagtactttgtcagctgctcttggaatacctaccactttcatatgacaattttccttgctgtgataatttgaatttccaccataaaatagcactgctgagagtccggcattatatactgtcacatgtagtattatatctcaaacaggatgacatggttcccgctctctaagtacatcaggagtgaatgaggaatacccgaagaaaacaaatacaacaatatcctaacattatggcacaggtaatggcaaattttatcatttcaattaaaaatattaagtcaagtagaatttatcaaacaagtaaactgtggaagataactcattgtcaagtatttttcttaagattccctataaaaataaggtggctcatgcctgtaatcccagcacttgtgggaggccgaggcgggtggatcacgaggtcaggagatcgagaccatggtgaaaccccatctctactaaaaatacaaaaaattagccggccgtggtggcgggcgcctgtagtcccagctgcacgggaggctgaggcaggagaatggcgtgaacccaggaggcggagcttgcagtgagccgagattgcgccactgcactccagcctgggtaacagagcgagactccatctcaaaaaaataaataaataaaaaaaataaggcttattatagcactccaaatgcaggtgaatttatgtaagtacaatcaaaacatacgtctttattaatgcctttactacttaacgttttgaacaatatgtgtataaaaataaagtcaaatccatacgaaatcttaatttttaaaaattctcgatggagctggtcatggcagaatctaggaagaagagcaagagttttaaaaatctttattttttttagagctactttagtgacagtttatttttccacccaaacttttcttttaatcaaatttatacttgcagctcttaccttctttataaatcactgtagaataatcgcataatttgaagtagaagggaaaaaaatgtactcttaaaattgctccctcttgtttccatccccagtcaacccaggttacatttgcagtccttaaaaatgtgatgaataggaaatagagtcatttaaatttatatgtcacctaggaaatgtatagaaaggaatctaaaagctaagggactttttagtgataatacactcaggatttcatcagacttttacaacagttaatagggtgagagatggcatagcttcacagtgctagagataatgctccattcccataagtagttatataataccaatcacagcagcacttagtctttaacaaaagatcaaatgagttctttctgggagttacttaatccatagatcaggacaataaagagacagagtatcactgtacattattcagaggaaaggacagagggcagtgggtgttgggcaaagggtggctgtatgtgagaaagtcttgctaccaggctactttgacacagtatttgtacttacaggcttcagcatggtcccaattcctgctcaataaatctctaagatttaaagatttctgagatcaaagaaagtttgagggatttattccactagtcacttgccacagttcacatttatagttagagggtataattccttgcatttgcaaaagtaactaggggtattcacaaatacatatctgagcctactatagttatataaactattgcattttgatacattcatataattaagttaaaccctttaacctgtaagaggatggccactgaatctgtatccttatctcagcacattgagcttatttgacttaatatcttagcagttcttgcctgaagtttacaaaagcattgatgaacaaactggaatgattttttaaaaaatgtttaaacattaactattagtcccctttgtattagtgaggcttctgcaaagaaatagaaccaatagttaatctctcaggattattctaagaaattggctcatgcaatcatagaggctgacaagcaccaagatctacaatcaatctgaaaacccaagagagctgatagtatagctccagtccatgtccaaggcttaagaaccaggagagtgaaagtgtagttccagtctgagaccatgtaggattgagacccacgaagacccaatgtttcagtttgagtctgaatgcaggagaaaaccaatgtccccacttgaaggcactcaggcaggagaaattccctttactcccaggagggtcatcttttttgctctattcagacattcaactcactgaataagccccactcaccttgaaaaaggcaatctgttttatttggtctaccaattaaaatgtaaatctcatccagaaacaccgtcacccccacacctagcacaatgcttgaacaaatatttgggcactctggatcccggtaatgttgacagatgaaataatcatcacattctgcaaatgcatttctctgtagtttcagtattttactcactcaaactgtagttgtttttgagataagagtcaataaaggtcatgcaagggcatttaatcagatatcttaattttaaatagtggaaagccaaaagaatcagttccaatattttttccctagagatccaccaatagttctccattgtttttatagaggacttaaaggtgattcactcaattatcttcccaaaagaacaatgacagacttagtagcgccatctaaattataccccccatatatatattttagtgagatatttgtggaacatcttataacagatgcaggttatcaactaaatttctcttttgatgtggttttgtttggtcttctaaacagtattttataaaacaattaagagtaaaatactcaatccaacaaatttcttttgtccacatgtctaggaaggaatgtgctttattggtgggtggttgacaataattggaacatggagaatgagtgtttctagatgaacagtgaactacagagggtggaaaatattatcatgctactcccaatcaccagcaaatgattgacattaatttgtcagtctggattgcaataaaccaaaatacagtgttttatggtagagttataaatattatcttctttagtaataaaaaaaatataaaacaacactattgcctggaggaggtattaaataattgttatattaattgtaggaaaccataatgtctctcttatttaagagaagccattacacactcaatgttaaaatgtggaaaggtgcagaataagcaaatacataaatttttaataggatttgtgaattattcagtttatttctgtcttagttactttggactactatggcacattagcatagactgggtggcttaaccaaaatttatgtctcatttctagtgtctgggaagtctgagatcaagatgctggaagatccagtgtctgatgagggcttacttctttgtttgcagaaaactgacttcttgttgtatcatcatatggcagaaggagagctaataagctctctagcctcttataaaaagtactaatcccatttatgaggcctccactctcatgacttaatcaccgcccaagggccccaccttcaaataccttcacattgggattagagttttaacatatgaatttcgaggaaacagattctgtctattgcagtcccttattttagctatcagcaagtttggccaaaccagtatttttctcttaaatttaattttagcagccagattatgatatcactgactttcatcatgctgcacatattaaaatgtacaagttgacaagttatgacctgtgtatacaactgcaaaaccatcaccacaaccaagataaccagcatatccatcatcccagaaagtttgcttaggcctcttcctaattatttctcattgcttttctctactcactctcacacagtttccagaaaactactaatctaattttgttcactctacattagtttgcatttttgaaaaatgacataaagggaattacatattatagcacacataattttgtctgggttctgtcattcagcataattattgtgagtttcatctgtatcatgtgtcagtagctcattccatttgattgctcagtagcatttcattgtattcatataccacaattgttcatctattgacctgttgacagacattagagttgcttaccaataaaactgtagaaacatctgtttataaataatcatacagataaatgcttttatttctcttgagtaaattcccagtaactaaagagatggctcataagtgtaggtgtctatttaacttttcaagaaactgccactctgttcccaaaatggcattatcatttcattttctccacagcagtatatgagagttccagtttttctgtattctcacaaacacttggtatgattggccatttttgtttaaagccattctgattggtatatagtagtatttttatgacagttttaatttgcagtttccttatggacaatgatgttgagcatatttttcctgtgcttatttaccatctctctataccttatggtagggtgtctgttaaaatattttgcctatttttaattgataaaattcaacacccattattattaaaaagtttcagccaaccaggaatagaaggaatctttctcaatctgatataacatcttgaaacatctatagctaacatcaaacttaatggtgaaaggctgaattttttctttttactaatatcaggaacaagacaaaaatgtccagtcttactatttctctttagcattgtagtggagctttggctagtgcagttgggcaagaaaaataaattagaaagaagtagaacttgtttttacatagatgacatgattatgtacaaattctgaccaaacctatgaaaaagctactggaactaataaacgagatcagtaattaaagttacatatactagtaataatatttaaatattttgttaattttaaaactatcatgtataatagcataaaagtatgaaatatttaggaatgaatctgataaaacatgtgaaatatctgtattctctactctgagaactgaaacctttataatgttgctgagagaaattaaagaagacctaaataaatggaagagataaatcatgttcatacctctgggtacttaatatttttaagatgtacattcaccttaatttgctaaaaattcaataatatcccaatcaaaatcctagggagcttttgtttggtggaattaacaaatcggttctaaaatttatatgggaatccacagtatctacaagagccgaaatactagtgaaagtgaataacagagttggagaactaacataactaagaacttaacataatttcaagacatactacaaagccattataatcaagactgtgttatggtttttaagatagatacatagatccatagaacagggtagaaaatgaagcaaaaaaatatatatatatatacagacatatatgaacaactgattttcaaaagagtaaaagtttttcttctagggtttttatggttttgagttttacatttaattctttaatccatcttgagataatttttgtataaggtgtaaggaaggggtccagttttagttttctgcatatggctagccagtgtgcccagctatttattgaataggagatcctttccccattgctattgcttgtttttgtttttttgaaaatcagatggttgtagatgtgtggtgttatttctgaagtctctgttccattccattagtctatatgtctgttttgataccagtaggttactgtagccttgtagtacagtttgaagccaggtagcgtgatgcctccagctttgctctttttgcttagcattgtcttggctgtatggggtcttctttgattccatatgaaatttaaagtagttttttctaattatgtgaagaatgtaaatagtagtttgatgggaatggcattgaatctagaaattactttgggcagtatggccacttacacaatattgattcttcctatccatgaggatggaattttttttatttgtttgtgtcctctcttatttccttgagcaatggattgtagttctccttgaagaggtccttcatgtcccttgttagctgtattcctaggtattttattctctttgtatcaattgtgaatgggagttcattcatgatttggctctctgcttgtctattgtttgtgtaaaggaatgcttgtgatttttgcacattgattttgtatcttgagactttgctgaagttgcttataagtttaagaagttttggggctgaggtgatggggtttttctaaatataaaatcatgtcttctgcaaacaaagaaaatttgatttcctctcatcctatttgagtacgctttatttctttctcttgcctgattgtcttggctggaacttccaacactaagttgaataggagtggcatcattcaggacataggcatgggcaaagacttcatgatgaaaatgccaacgaaaaccaaaattgacaaatgggatctaattaaactaaagagcttctgcatagaaaaagaaactatcagcagagtgaacaggcgacatacagaatgggagaacattttagcaatctacccatccgacaaaggtctaatattcagaatctacaaggaatttaaacaaatttacaagaaaaaaacaaacaaccccatcaaaaagcaggcaaacaatatgaacagacacttctcaaaagaaggcatttacatggccaacaaacgtgaaagaaagctcaacatcactaattatcagagaaacgcaaatcaaaaccacaatgagataccatcttatgccagtcagaatggcgattattaaaaagtcaagaaacaatagatgttggcaaggttgtggacaaataagaatgcttttacactgttgatgggaatgtaaattagttcaaccattgtggaagagagtatggcgattcctcgaggatctagaaccagatataccatttgactcaacaatcccatgtctgggtatatacccaaaggaatagagatcattctactataaagacacatgcacacatatgtttattgcagcactatttacaatggcaaagacctggaaccaacccaaatgcccatcaatgatagactggctagagaaaatgtggtaggtatacaccatggaatactaagcagccaaaaaaaggaatgattgcatttcctttgcagggatatagatgaagctggaagccatcatcctcatcaaactaacacaggaacagaaaaccaaacaccacgtgtcctcactcataagtgggagttgaacaatgagaacacatggaaattgagagaagggatcaatacataccaaggcccgttgtgggttgcgggggtgagaggaaggaacttagaggacaggtcaataggtgcagcaaaccaccatggcacacgcatacttatgtaacaaacctgcacgctctgcacatgtatcctgttgtttgttgttgttattgttcttgttttgtagaagtaaagaaaaaaataaaaaaaagaagaaaattaattcaatggaaataggagactcattacaacaatggtggtatagcaatttaatgaactttggcctgtacctcacatcatacacaaagtgaactaaaaaaagaataagcataaatgctaaaacttaataaaaatgattttataagttagttttaagacacacagagaaggttctccacatgtaataaagtaatgagaggtaaggcaggaatcatgaagaactatgatttatttcttaaatctgtaaatattcataatcaatgagagaggatgtaggggtacacagtaatattgatgaggtaaacaagtgaattcttaatcaatagtggtcattgtcctacttcttcctaaaaggaattaatttccaaccaaacctggataatatttcttctgtttttattcttcacatgaatagatagagttacctctaagagttatagagttgggaattttgtccagccctgacatttattgaaacaaatgttatctatcaactcagtgatataaattttaattttcaataaatgagaatctcttaaagaaataatggtagtaataatgatgaaatatctttgcaaaagatatcaaagtttcagattgtataatagtttgaacatcaagttgatcatttgaaaaatttcgttaagtattcaactttgtccaaaggatgtagacctgtattaggagacataataaaatattatcaataataaatgtgccttatttgaataaattaatatttgagagcctttctgactgacaatgtcagcaggaaaaatggaaatgaaacatttgcattagcagattcagaagtgctagaaaaggtacaaatacggaagctggggaatttcacggttctaactactaacaatagaaaagaatttttatacatgcctttgggagttaaaataagaattaaacattgttttatatccttacatttattttcagaaataatttcacctatgttactgtattttgggaatagcctctatgactattcagaaaatatttataatctcaaaataagagtgattgaaacacacataaaaaaatccagaggcagaagttatagggcttccttcctatcgaagggtccaacattcttctgttttctactccatcattattgattcctgtatctattatcaagtcaagtcatacatactccaagatggctactgaagcctggaccaaatctgctctttcaattcaacagatggggaaagacatcaaaagggtacattgtcaactgaatagactttctttaaggaaccttcctgaaagttgaatacatccattctctttacctctctttaattagaatctagattatatggcaacaacaagatacatgggttatatcattttgtagcttggtttaccttataaattgtatatgactttatatgggaagaacatgaggataaatgttgggtaggcaactagcaagctctgttgaagtctctattgttattaggccacactaaattttcacattttttctctattttgggggtacagaatattatcagttaggaacaatcattcttaaatgtatagctatacacatgacaagtatgcagtacaatcattcttaaatgcatacatatacacatgacaagtatgcaattacaatgctggagacagtctgagtttgcatttccacatgtgtgctcagaaagtactttttaaatacttgccttagtgtcataatcaaatagtattgtataaataattgtaccacttcaacattattcactggaaggcacaaactgtacttaatgcatctgtatcagtcaactgttgctatattataaacaattaacacaatctcagtgacattaaaaataaacatttcctctcaagcatctgttaatcagagagggcagctcttctgacctcagttggacagactcagtaatccacttattaagctcagcaacttgattcttcttcaggtacctagcagtgaataaagaaacaagcctaatgctgtaagcccttggttgtgtcaattgcacaaaccaagtcacttagttcaaagtcgagagtcagggaagtagattcctttgtaagaattgtacaactacatgaaaaggagcaatgatataggaaagaatggagaatgggctggcaattaaacctaccacagtaaaaatcctcccatataaagtcatattgaaacctcctgaatttagggcctgacatagttgacctcattaaacagattataaaatgaggacggaaatacattttaaaccaccactttgttcaggcttctttgcccataccttcttaaaaacatttccttaaaaacatttcctatatatagcttcacattatttcttaaaaatgatcattgaagtttaatatataccagttttctactactttaataagttctttaatattaagaacttattcatgagctgggtctaatggctcccacctgtaatcacaacactttgggaggccaaagcaggaggattgcttgagcccaggagttcaggaccagcctgagcaacacggcaagaccttgtctctacaaaaaatattaaaaaaaaatagccaagtctggtgatgcatgcctgtggtcccagctacttgggaggctgaggtgggaggatcatctgagcccgggaagtagaggatgcagtgaactgtgttcgcaccactgcactccagcctgggcaacaaagagagactttgtctcaaaataagtaagtaaataaataacttattcataatttctcatctgaatgcctcctactactggttgcacaattggttcatcattgtgtcaagtcttccactgtgccagaacaactgtaaatataaataaaacctaaggaatgtaacataaatgaggattcattaaagtctaaggattaaacaaatctatatataaagtattgaaaataaattcctggcaataaataacactcattttatagtatgttgttattaaagacattttactgaacatgaattctttgcaagataatgttataataagttaatatttaatttttttaaattggacattttattttttaaaaagaccatgaaaagtcgtgcttttccacttacaggctgcatgacttgggcaaataattcagctgctatgattctcagatgtattctttttacataatacatatgagatttaaaataaaatatatatctgaaatacttagcaaagtgcttggcatatattatgctgtaaataagtattatcttttttgttgtctatttccctctatcagtcagagtcaattcagaaaacaaaatcacatcagttactttaccaatagaatttaatgtaaacaattgttaaccatgtacaaatttgttaattagcttataagaaagtcctggtgatgactcttaaggagcatgctgccttcaagcatctgtttaacaaagcacatcttgcactgcccttaatccattcaactctgagttgacacagcacatgtttcagagagcacggggttggaggtaaggtcatagattaacagaatctcaaggcagaagaatttctcctagtacataagaaaatggagtctcctatgtctacttctttctacacagacacagtaacaatctgatctctcttgcttttccccacatttcccccttctcttttcgacaaaactgccatcgtcatcttggcctgttcttgatggtcgctgtctcttcggagctgttgggtacacctgcagactaacaacagacaaaacaggcacacaaggattaatatgagatttataatcgtagtacttccaatggtcttaactcaagtgacagggttaagatttgcgaggccatcagcaacttctgcagttgcctgagttcctggcaccaaatttaaatgggcttttgatgcttcgaaaatttgttcttttaacttggaaatgtctaaagtgagagtatcttcttttccttgtagatggcgtctaaccatgtcctagtgatgcttagactcattataaatttgggttgtaatacaaaaatctgacgtattctagtcacactgtaactggaaacgatgttctaagctcatgagtctgtcttccatctaaatgacagtttaagatcattaatttgatttaccaatttttgatcaatactagattgtgaattccacaatcttgtagaatttttttgccaatcattaacaaagttcactgactgaacagaagagtgcaatgcaactcttgctacagcagccgtagctgtgactgcaattaatcctataatcactgcaattaaagtaaaaatgaatcttttggatctatttaaaacaccttttaatacttcagtcaaaatatggacggatggcgaggcctcctacggtcggtccatggacacagggatccacacgccttctcttgctctcaccagcagaatacggtgttgccaattaaaagttgaatcaatgcaagtaagcaatctacaattttcacaggttatagtctgggagtctggtttaataactatatttcttacaactagcatataagggggctttacgcaactttgtaaaggaaccgttagactggaatttaggtcgatagtataaaatggcttatgatctcttgtttctaaagtttgatttccagaccaaattctaatgtggtgtgaggccacagtaatcctccataattctggatgttcaggaccagaaacaggacttattatttttggtcttggggtagagattcctttttcttcccattcctaagggtagaaagactgcaattttttatgcttatgtttgtctaaactttctgttaagtcgctatcaacagctggactcacttgtgcacttggacacgactgagtttgtcctgagcaattgtggtagaattgacctcgaggtgcccaatctataatagttccgaattcattgttttgtaatatcactgcactattggccacacattcttcctaaactaaaacttctgtattttttgattctttgggaatttccttggggcaaggtttctctttaggtctaaattttaatgatctttgataagaaaagtcttgtaaataatttacctgtggcctgagtgacatcctgcttaccatgtgataagtgaatctactgatgggactgacagtaggtacttctaccaaccaattttggactgcaggcattaaacatcttggtgctctccctaggcaaataggaagataacgatacctaatggaaatatttatcatcatcctttcttcctcaggtttggcagggcagcgattatctatggggccaggtacctatacactatcattaacatatacttctataggattatccatccatgtgactggtgttactacctccgtggaggcccttttctttgcatctccgacgggttcattgtagaacttcaaatgtctagtgggtatccaaacaggaagctgattttctcctggtgaaacacaagcaaaacctctcccccacgttatcaccttccttatttcctatgtcttatttttattatctttctactaaattaggtttccttcatgtgggctgttctttttaccagtaagatgttgttctgcagaagtagtagcctgatttctgtaaatgtttaaaaaatttaaagtatagagtgctagattaagttgcatctgaggagtggtacactccttactgtctcccccttctttttgtttaactaattgagttttgagtgttctattagttctttcaactatggcttgtccttgggaattataaggaattcttgttgtatgtgaaattttctactgacttaagaatttttggaaagctttactacaatatcttggttcattgtcagttttgattttttctggaacttctattacagcaaaacaagacaataaatgttttttaacatgggaagtactttctcctgtttggcaagttgcctatatgaaatgtgaataagtatcaactgttacatgaacatatgataatcttctaaatgaaggtacatgcgtgacatccatttgccataatgcattaggacgcagacctctgggattaacttctgcctcttgagtgggcaggtgtaagacttgacactgggtgcaatgttgtacaatatcttttgcctgtttccatgtgacatcaaatttgttttttaatcttgctgcatttacatgagtcaaagcatgaagttcttgtgcttttatgaatgcagatgatactagtaagtcagcttgttcatttgctttagtcaaaggccttggtaaattagtgtgtgctcgaatatgagtaacataaaatgggaaatttcctttttttacagtttgttgtaataaattgaatagctggtttaactgatcatccatgctatatttaattagagctgtcttaacatcttttgtagcctgtactacatatgcagaatctgatataatattgataggttggtcaaaatcttgtaacactgtaatgactgcaactaactctgctctttgagctgattgatatggagttttgattactcgttctttcagccttgtgtaagctgcttttctattgctggaactatcagtaaatactgttagagcattttctaaaggttcacgtctggtaattttaggtagaatctaagtagtcaattttaagaactggaagatctttgtttttgggtaatgattatcaataattcctacaaaattagcaagactaatctgccatgcactagaattgataaaggcttgtctaacttgttctttggttaaagggacaagtattttgtctgggtcatttccacataattttattattcgtaatcttgtctgaccaattaatgtagctatttgatccaagtacaatgtaaaagtcttaattgtactgtgaggaaggaaggactacttcacaagatcagtattttgaataatgatgcctgttggagaatgtgcagtggcaaaaatcaaaagttggagtggggctaagggatctattctatttatttgcgctgacagaattttttcttctactaatttaatttcttttgttgcctttggggttaacattcttttactatttaagtctgagtcttttcttaagatagagaacaaatttgacatggcataagtaggaatgcctagagttggctgaatctaattaatatctcctagcaatttttgaaaattatttagtgtttttaatgtgtcttttcttatttctattttttgtggcttaatttttctattttctatctgcatccttaaataatgaaaaggagtagaggtttggatcttatcagatgctattgccagtcctgcattggcaacctctgcttgcagaaatgtataacagtcaattaatttatctttcgtttctgtagcacataaaatatcatcaatataatgaataatataacagtctgaaaacttgtctttaactggttgaagagcttgacctacaaaagtctgacaaatagttggactattaagcattccttgaggtaacactttctactgaaacttggtggctggttctttattatttatggctggtatagtaaaggcaaatttttcacaatcctgctccgccagagggatggtaaaaaagcaatcctttagatcaattataattaaaggccaatcttttgggatcatggctggagagggcaactcgggttggagaggccttatgggttgaattacggcgtttacggcctttaagtcagttaacatatgccatttgcctgatttcttctgaattacaaacacaggagaattctaaggtgagaatgaaggctcaatatgacttttttctaactgttcatttgttaataaatgtaaagcctctagtttttgttttggtagcggccactgatttacccacaccggtttttctgttttctaagttaatggtatgtgtttaggaggctccacagtggccgcctctaaaaaggataccttattccttctttttcttgatttattttagcctcaactggaactttaatgccatcttcatttttctttagtccttttcctggtatatatcttatcttggtcatgattttttgactcgtggggctatataatggagtgggcatggtgatttccccacctcattgttataataaatcttgacttcacagattaagaggaattgaagtaatcattggctgaacagtactttcttgattatctggccttaagcaatgtaaaatcttagtactttgatacacttctgaggctgtgcctatgccgacaagtcttgtaacagccttttgtttaggccaattttttggccactgatttaaagcaatgatagagacatctgctttagtgtctactaacttttcaaactgttttccttgaataatggccttacacacaggtctgttctttgagacttgacttgcctaatatgcagcctttcttgttggatcagtgcttccaagccctcctattctttttatttcactatttccacctttaatatatggcaggagtaataattgagcaatcttgtctcttggactggcacttcaaggaattgaagagctaataactaactgaatttcgcctttatagtctgaatcaactacaccagtatgaatttgaactccttttagatttagacttgatcttcctaagattagtcctacagtcctctcaggcagtgggccatatacctttgtggggattttttgtgggggctcctttggaagcagagagactgcttgtatagtacataaatctactgctacactgctgcttgtggcgggggacaattgttgtattgtggtaactggcttattccttgaaacacttgggacagtgggggttgttgtctttgaaaaccttgaggaacaaatggctgaattgggaatgccttagtttgttgtggggcctgaggctggcctctttgcttgtttcctgacaatgcttgcctatttttatcaaatttagaatgacattgactagcctaatgttttctttttttacatcttggacataagtcaggtggttctctacttgttgtggtagtagcttgaatagttatattctgtttatttaagactgggcaattcttttttaagtgactaatttgactacaattataacattttcttccaaatgttctaacttgtcctcctaaaacaactcctgttattgcttgagccataagcatagctttatgcatagctcctccgattccatcacaggcttttacatattctgagattacatctgatcctgcaggaacttttccttttaatggcttaatggctgattgacactcaggattggcgttttcatatgccatcaacttcactatgaccttacgggctttttcatcggcaattgacttttgagcaacatcttggagccttgctacaaaatcagggtagggctctttcgaaccttgtcttactgtattaaatgaggggcaggcgcttcctaggtcttggattttttcttaggctctaaggcagatagttctaacttgctcaatggcctcattttgcattaatgcttgttgactaatagtactctaattttgacctgttcttaatagttgatctgcatctatgttaactggaggattggcagccttatttcttcggacccgttcttgtacctcatcaatctactaagtcttaaattgtaaaaattgagagggtgagagagacgattttgccagaatctcctaatcataaggaatgagtctatgtccatgagcaatggaatctaataatgtcctcatataaggggagttgggtccatactgttttactccttctttcatatcttttagcatttttatcgaaaaagacttgtatctggcctcaactgtgagaggctctccctcttgggctccttctccaggtggcatcggttctaacattactgggaattgccatgcctcagtatctccttcctttcttgatttatcaataatttcatgtaattcactaccttgtctactaggtggtgccgtaggattaagtctcctagtgggcggctgagggtatggcgccctgccctgtggtgctgggggcattcttggatatccatactgactttctgggggtggccgatactgaagttcagccggcggctagtattgataagctactggcggttgggtcttattttctttaacctgcgtttgaggttgtaatgttacaggcacctgacttgctggaagaggacttggccttcgtggtttagactctggtggcctcactaattcgggaccttttccttctaattttaacgtttcaggatatatcacctcctgtaattgattatagtcaacattttgcgttgactgagccattactggctctgctacatattcgcaatgtaaacttcccgtttctttctgggattttttctttgtcttttcattacaatctattaaacagcttctaggggcatcagaaactgaaacgctatcttcttctgtttgaaatggttctaaagctgctttaataatggcctaatcattccatactgtaagtggaatgatattacttttcctacctgcttgttttagttccttactaattcttttttaatcttttagatctaaagttccttgttctggaaactatgggcaaaattgttctattatttgaaatagcttgattagattttttgtagatactttaactccccctctttttaaaagaattttaataaagctgagataagaggcatatttacttctaattttaggggtgggttgcccctccacaactgtgggtgtttctcgtaaggtggaacgagagacttaggaaagaaaaagacacagagacaaaatatagagaaagaaataaggggacccggggaaccagcgttcagcatatggaggatccccccagcctctgagttcccttagtatttattgatcatttgtgggtgtttctcgaagagggggatgtgtcagggtcacaagacaattgtggggagagggtcagcagacaaacacgtgaacaaaggtctttgcatcatagacaatgtaaaggattaagtgctgtgcttttagatatgcatacacataaacatctcaatgctttacaaagcagtattgctgcccgcaggtcccacctccagccctaaggcggtttttccctatctcagtagatggagcatacaattgggttttataccgagacattgcattgcccagggacaggcaggagacagatgccttcctcttgtctcaactgcaagaggcattccttcctcttatactaatcctcctcagcacagaccctttacgggtgttgggctgggggacggtcaggtctttcccttcccacgaggccatatttcagactatcacatggggagaaaccttggacaatacctggctttcctaggcagaggtccctgcggccttccgcagtgtttgtgtccctgggcacttgagattagggagtggtgatgactcttaaggagcatgctgccttcaagcatctgtttaacaaagcacatcttgcaccgcccttaatccattcaactctgagttgacacagcacatgtttcagagagcacggggttgggggtaaggtcatagattaacagaatctcaaggcagaagaatttctcctagtacataacaaaatggagtctcctatgtctacttctttctacacagacacagtaacaatctgatctctcttgcttttccccacacctggcaataaataacactcattttatagtatgttgttattaaagacattttactgaacatgaattctttgcaagataatgttataataagttaatatttaatttttttaaattggacattttattttttaaaaagaccatgaaaagtcgtgcttttccacttacaggctgcatgacttgggcaaataattcagctgctatgattctcagatgtattctttttacataatacatatgagatttaaaataaaatatatatctgaaatacttagcaaagtgcttggcatatattatgctgtaaataagtattatcttttttgttgtctatttccctctatcagtcagagtcaattcagaaaacaaaatcacatcagttactttaccaatagaatttaatgtaaacaattgttaaccatgtacaaatttgttaattagcttataagaaagtccagactaaaactatagggtatcatggaggcaacaattgaaataatctaccattgttccctatggctagaagaacaaaaggaagatgttagaattactgaaatttagaagcatggaggaggggcccgagaaaatgaaacacaaaccttggagaagagggtgctggtgtgagtggtgatgaggctggtaaggctggtatagtaaatgttggaaaaactgcaacctggatttagttgcaaccgcagggaggaactgctgctgccagggtgaagaaacactgctatagtggaagctgcgggagcgagagaatgtaagcaagcctagaggaagaaaacaggaaggaggaagtcacttcctcccccagcctcagtctctcagtaccactttatcctggcagagtagaaagtggtttttcagatgctagtcctagcatcacaaagcaaaggtgaagttagagtggagagagaatagcttcataaatagcctactttttcactcctctaactccattcatttttacctctaatttttccttcttactttctatcatttcttttttcttctttttgaggtttttttttttcttagacggaatcttgctctgtcgcccaggctggagtgcaatggcgcagtctaggctcactgctacctcttcctactgggttcaagtgattctcctgcctcagcctcctgagtagctgggactacaggtacgtgccaccgcacctggctaattatttttagtagagatggggtttcaccgtgttggccaggctggtcccaagctcctgacctcatgatctgcccgcctcggcctcccaaagtgctgggattacaggcatgagccaccacacccagccctctttttgcctttctttattttcctcctggctggccttccatccttccttccttccttttttggcggacaacaattctatgggcttgaaaagacatgtttttaaatgtaagctattgtcttttatgtaataaacagatatcgaaaattatacatcagttcagggaatctatataatcatttaaaaaaatctatggtgccaggcactttacatcatcttaattcaaattattaaattttcacaatcacagggataatagcagacctaagatttgaacccaacattttcagcctccaattatgatgtttaatttttttttctatatcacagattccagttcatttggataagtagagatgaataattcagtcatcactgtcatttgaactaggtaggcctcaaaagaatatgaaaattttgatacattgagaaagtatatgatacattatgaccactgaaaaatttataagcgaatttgggataaggcaagacattctccataaacaatattcaataaatctaataaactaaaaagttgtaaaatttccaatataaatttatgtaatttgggaggaataaatgtttctttttcttattatatatgtactaaaacttttaagagaaaatatttgaaagtatcatcttttacatacaaaaatacagtttggaagttaattaattgtactgggcaataaaaaaaaattaaggtaactttcttaaaaagtccactaactgttatgctgatggcaatttcaaaagcacatcttattatctaatacgagaagattaataccaactaatgtatttcctggtaaagatataacatgaatttagacctataaagataaaattataactaatcaccagagatgaaaaataatcttacttttttttgaaattacatttgaaaattttagaaaaatatatgtattaaaacaagtttactctgtatgtaactaaatcatctaaaatatgcaaacatatttaaaatgattaaagctgcattttgatgataatttacaactatatgtataactacacagaagtcttcaaatgaaagttaaaatatccaaaaactcatgtttcattctatatttacctgtcactagggaaccatgatcttcagttggactgtttttatttgagattagaggaggtttagaaaattaggaaaattataggttccaaatagaatatacaaatatagttgccaaagtacagagatagagagaggagagagagaatgacagaaagagagagagagagagaagcaggaagagaaggaggatgggaatgggaaggaggaggaggagaaggagaaaggggaggaggaagttggtggaaggggaaggggaggggagacagaaataggaaaatcaccttgattgtgctggatataggcagaaaggaatatgtcataagcatacaaatctaaccccttagtctaatttttacattttaattataaattccacttctacattttcttgttaacaatttccaatagacaataaatttgaattgttagaattaggtgtttcaaatccagttcattgtctaatagagattatgttcaagttactaatggaaaaaattataccttaatagacctcaagtgtattatggactcaggtaattactaccaaaaactaaggttctaatgggctactcatcctttttttaaatttttatttccataattttggggatacaggtagttttttgttacatggataagttcattagtgttgattactgagattttggtgcacctgcgattttgctgcacctgtcactggagtagtgtacactatacctagtatgtcatcttttattccttactcccctttcactcttctgtcctgagttcccaaaattcattatatcgttcttatgcttttgcatcctcataacttagctcctacttataagtcagaacatacagtatttggttttccattcctgagttactttacttagaataatggcttcctgcttcatccaagttgctgcaaaagacactatttcattcctttttatgacagagtagtattccataaggtgaatataccacatttttttacccactcattggttgataggcacttagattgattccacgtctttgcaattgtgaattgtgctgctatcaacatgtgtgtgcatgtgtatttttcatgtaatgaattctttttctttgggtagatactcagtagtgagaaaaaaatcaacaaagtaaacagataacccacagatcgggagaaaatatttgcaaactatgcatccaacaaagggctaatagccagaatctacaagcgactcaaacaaatcagcaagaaaaaaattaaataggatgttggctgtgggtttgtcatacatggcttcgaggtttattttattactttcaggtaaattccttctgttcctattttgttgagggtttttatcataaaatgatgctggattttatctaatgcctttgttgtgtttattgagataatcatatggtttttgtttctgtttatgtgatgttttacatttattgacttgcatatgttaaaccatccctgcatcccagatctgaaacccacttgatcatgttgtgttatcttttagatacactgttggattcggttagctagtatttcgttgaggacttttgcatctgtgttcatcaagcatattgctctgtagttttcttttctctattatgtcctttcccggttttctatcatggtggtactggctttaacaaatgatttagggagaattttctctttctcttttttttgttttgttttgtttttgtttttcttttaatagtttctgtagaattcgtaccaattcttctttgaatgtctggtataattcagctgtgaatccacctggttctggacatttatttttgttgggaattttttaaattactgattcaatctcactgtttgttactggtttgttcgagatttctatttcttcttgatttaatctaagagggttgtatacggccagaaatttatccaattcctttagattttctagtttgtgtatgtaaagattttcatagtagcactgaatgatcttttgtatttttgtggcattgtaacatctccattttcgtttaacattgagctttttaaatcttctctcttctttacatggttaatctcactattagtctatcaattttgtttatcttatcaaagaaccaccttttgtttcatttagcttttgtatatatttttttcaatttcatttagttctgctctgatctctgtcatttcttttcttctgctggtttgggtttcggtttgttcttgtttctccagttccctgaggtgtgacattaggttgtctatttgtgctctttcagacttttcgatgtaggaatctaatgctatgaactttcctcttagcatcacttttgctgtatgccagaggttttgatgagttttgtcattaatatcattcaattcaaataattttttaaaatttccatcctgatttcattgttaatcccaaaatttttcaagagccgactatttaatttccatgtatttgtataattttgaagattccttttggtgttaatttccagttttattccactgtagtctgagaagatacttgatatgattttgattttcataaatttattgagatttgttttgtggcctggcatctagtagagcttggagaatgttccatgcactgatgagaagaatgtctcctctgcagttgttgtgaagaacgtttggtaaatatctgttaagttcatttgtccagggtatagtttaagttcactgtttctttgttgattttgtgtcttgatgatctgtctagtgctgttagcagagtattgaagtcccccattattattgtgttgctatctgtctcatttcttaggtctaatagtaattgtttatatatttggcagctcctgtattaggtgcacataaatttaggattataatatcttcttgttgtgctaatccttttatcatgatttgatgcccttctttgtcttttttgttttaactattgttgctttatagtctgttttgtttgatatatgaatagctactccttctcgcttttggttttcacttgtgtaaaatatatttttctaccccttagacttaagtttatgtgagtccttatgtgttaggtgagtctcttgaagacagcagatattttgttgtcagtttttaattcaatttgtcattctgtatcttttttttttttttcttaaaatggagtctcactctgtcacccaggctggagtgcagtgtgctatctcagctcactgcaacctccgcctcccgggttcaagcaattctcctgcctcagcctcccgagtagctgggattacagacatgtgccaccacgcctggctaattcttttgagtttttagtagagactgggcttcactgtgttagccaggatagtctcgatctcctaacctcgtgatccgcccacctcggcatcccaaagtgctgggattacaggtgtgagcccctgcacccagccaattctgtatctttttagtgcagcatttaggccgcttacattcaatgttaatattgagatgtgagatattgttctattcatcatgttagttgttgcctagatactttctttttatcattctgttactgttttataggccttgtgagttttatgctttaaggagattctattttggcatgtaccgagcttttgtttcaagatttagaactccttttaacatttcttatagttctggtttggtagtggaaaattcccttagcatttgattctctgaaaacacaagcaaaaccaagtttgtcattcatttatgaagcttggtttttctagatataaaattactgactgacagttattttgtttgtggtggctaaagataggaccccaattccttctggcttgtaaggtttctgctaataaatctgttgttagtctgataggttttcctttataggttacctgatgcttttgtctcacagctctgaagattctttacttcatcttgacttcagatagcttgacgactatgtgccttggtgataatctctttgcaatgaatttcccaggagttctttgtgcttctggtatttggatgtctagatctctagcaaggccaaggaagtttttctccattattccctcaaattggttttccaaattttcagacttcacttctctctcaggaacaccaattatttttaggtttggctgttttatgtattcctttatttcttggagactttgtttattttattatttcttttttctttgcctttgactgattgggttaataaaagccttgtgtttaagttctgaaatactttcttctacttgttctagtctattgttgaaattttccactgcatttttttttttcttaagtgtgtatttcatttccagaaattcctattacttttttctttatgatatctatttctctggagaaaaatttattcatatcctgaatttttttcttaatttctttaagttgcttttcacttttctacagtatctccttgagtagcttaataattaactttctgaattctttggcatttcagagatttcttcttgatttgaatccattgctggggggctagtgtgatcttttggaggtgttatagagctctgttttgtcatattaccagacttaacattctggttctttcttatttgggtagactatttcttcacattgttcttgaatttatttttgattggacttttttttattgctttttttcccctctgaaggatctgactttagtgtttgtagtttattttagcctaatttgattcttggtgcttttagggttgaagactcagtatgagttccttagttatagagcatctttgtacactgggtttcccagatcctagttgtagtagttgtatacttggtgtgtgagaaggttcactgtatcctatgggattggaatcacagggatctcttgaagcttatcttgttctcttgtggtgtacactttatttatttatttattttatttttcccaagtagtttatttactcagttgatgattcaggctccaagccaataggggaggtatttctgggtaggcatcagttgtagctaaagcaggtgggtaaatgtaataaccaatgttgggcagaggtcttagccttgatgaaggtgactcctggagctcttaattagatggctttatcagggtgaaggatgggagctacgtcagctcccatgccagaccagcaggaaagctatccacctcacagcctcactcttgtcccagtagtctgactattcagatcacacaggaacttcttttcatctgtaggaatgtgaatgttccaaatagggaggaattgttactctcaattttgatattgccttcctttctggatatggaatgtatatacgcatatgaaagcttcaaatgtttttaatttatgattatcatattgttactaaatgaccatagaacagtaaattgcacaattaaaatgaattttagccagtttgtgtgacaaagaaggaggaggtaataaagaatcaagtgaaatgcgttcaaaactgttttacctctctgcaccaaagcattgacctagaatcacattctaaagaagatctttctaatcaacttctctagaaataaacaaaaacaacttcattgaattctcaacacaagaatccctgcctcacaagggaacctgtaccaattgcagcatgtctgaactcagtgatagagtgggatgtttggctagcaccaatgtggagttacagaattctcctgcccattttctttcttagtactcctctctctacactgagatccataaacttctgttctggatgtcccagcttggtttactattctctttatcaaactttattaccattttataaattcttcagtcaccattacaataatatcatatactttatttgccaagggacatataaaccatgcatgcatgtcaggtttactcttgatattatgttggtgcaaaagtaatggtatttttgccattcgtgtagttggtgtgtgagaaggttcactgtatcctatgggaatggaatcgcacggatctcttgaagcttatcttgttctcttatggtgtacactttatttatttatttatttattttatttttccatttttgccattacttttgcaccaacctaatagtttagctatcaatgtactgcagtcagtactcacctcttttcctttggccacaccagaggttacctacatctttgggggacagctactacacatgctaataactttctacgtcatgaaaatttgtcttttcctgagggctttctctagctacaagagcaagatcaacttgtgcccaggatacagtggaagtgccacaatgtaggaatttagtgtattatactttagcttcctgtaccttcagactgacagttgaggtgtgttctacacagtctctcagagagtctctagcagggttgagctcaatttgtccccagcattaatgtcctatttattggatttccttctttattatccccactcttttgaggtacttcttgggatcacttcccaaatacactcttttagaatcttaaaagtggcagaatatttatcattttataggcccatgtcttcaatatctagactacaagtctcttagaaccaaaatatgaaaggaacagccaatctcaccatcactcccagtgagtcacttgaatagttagtgtgtttctctctgcaaccagaggcatatttggatttaaggctctggttcttgaaagaatatggtggttctataagagaacattgtaagatttccatttagcatataacagtggctgcctgtaagagatttagacaataattactattatcatgtctggaatttttatattaattattacagagagctagaggcactattatacaatgaaaataggaaaagagtatgttgatcactcaaggcattcacctgggtgcctaatgatgtctccatgcccaataataacattaagcaggaaattacagcaaccaggacctggcaagggcatggtaactaaggactcatttaattcttttgcactctgttgaaggtctatgttatctgactaggcttgcagtctagaccagcacatgtgttgcccaaatatgaagggaccttaaaagaagtggtagaagaaagaggtaataaatatcagttttatcacgagattaactgtaccacattcaacttcagtttgactaattcttttgttatagttcttatcttcttaagaatcatagctgtctatcatattggtgaatcagtgaagggcagagtggattgaatgttggccatgagatctaaatgatacaaggtgtagacttcaggtgatacacttaatgcttcactgaaatctccttagcccactacagagaataatggcaactttggggaagtcctcctatatgccagtggttttctactgtgtatttctatatctctgtcgcgcagctttctctgtctgtatgatcaagatcaatctgcctgcaggacagtttggaagtgccaagggcttaatgattgcagtagcaaacctcaaccaatgaggatgaatgtgagtgaataaaaaccacacttacctgtccctcaggaccatagttctgagatattttccacataggttctcactggcattgaacccgagtgatctgcagtggttcctggctcagtaatataccttttgttgctgatcctcctttacctgtctcctagtctctcaccaggcttccatattacttacaaaataaactcttagcaaaagactatttgctgtacgaactacattttgggaaatacaatttcagacaccatcatcatacaactaattcttggactatttttctactaaaaatttaacttatagcaatatgtggttttgaataaattgtattttctataatgaaagtaatatgtctacaatttaaagatctaagtacttaatgaataaagaaaaaccacccatgaatgacaacagagtgagtatcagggccagaaatgaaaagaggtcaaatcattaaaatcatgtactgacatgaacaagaatcttgataaagaaaatgagcattttaaattaacccagaaatggaaactttccaaaaaatgtctccctttacaggcattgaaaagactttgaggtcacactgccaactttacatgaagaggagatgttctttgaattatattttcaatgaatttgtaacatttacattgtgtatgaagatagttctctgcagtgaacgtaaaagtccgtttgctataagtagaaaggaaaactttttcccagggagaccagggtcacaaattaaattatttggcttttgctcctggtatgtctgcttttatcacttgacccttgctgatacgctcagctctgcccgcagtacaggatcaaacatgcttctcatctggacaaatttagaaaaccttaatacacttgcacaggatggtcagttcaaacatacacttgctgcaagccttttgtcccagaatagcttaattctacctcactgccatgactgacctgggccagtgcactatggctgctctcctggtttactaatgactcctaagataaaaccccatgcttgcctctcagttctcattcatggatatccctgcagtatttgttcaccctgctttttgaaacttgccttttcctgtcttgatctaattctagttcttttaccgtatcagtcaatggctatttccattttctctatatttgttttatttattatcctactttattgcagagtgataggagatggtgaacagtaataaatacatatacatataatagtagtcagtaacaatgaataaaaggaaagaaacatgtataaagaggtaagagcacagtgcaaaaatatcagatactgatgcctattacaatcaagcccatatagaggtctgagcatacagctggtcctagactttattttctgctataattttacccaacacttttgtctcatcgaaccactatgcagatggatcccaggatattctgcaaatatcaatctctgttactaacctcccaccaagattagatctgcatttccttattggctatgaaacacgtccaaattgataacttgactcatttcaaactcagctcattgcataattaacttataatttttattttgttcttactcagcttcaaattctaccatttacttaccccctatttaacactaatgatcatcattgcattgttctgggccctggtgatacaatggtaaacatactttttctgctttcagggaatttaatgtttaatgtggcaagttgcctttatggatccacccaacagagtttccagggaaactgcagacacagccttgtcacgctcaaagacctagatcaggatgagccttcatatcctcaacatgttctccagccagataaagaaggcagctcaaccatcaaaaactggaaatgaggaaattctattcaaaaccaaagggtcagagatgaatgaggtttgtttacagatgtattgaaaatgtagctagtggagaagaatatgcagaacttgggcaaacaaaccaggaataataaaaacttgaccaagaaaggaatgcacatttgctatccagtaaaaattaaaaggtgatagtttattattggtaaaataacagcaagtgcatccacataaattaatatcactgttatttctaagcagcagaatgtggatatgatgctggagggtactggaaggactcaaaggaacaaatgacatagggattagggctatgaaagtacctggacaaagataacatttatgatctgcagccagtgggtcaaaaggtgtctccaaatgatattgaggcaactggctgcctatggatgctggtggaatcatggtggtgacatcctctccaggaaggattactgcatggagaaatgctccacagaccaaccctctgggtggcaagtccctggtgaaagtcaggctgtaccatatgacacttttccagggatctgtccaaagacagagagtgagccactggaagtgctgaatggcaaatttggccttgtgactagatttattgtcaggtagttatactggaagaagtccacatactagaaggcggtatgctatgactgttttaggaaatgtgaatttccatgagaagtttctaagtagcttgtgttttgtgataggtgggaaccagatttggcttgcattgaggacctgtgctatctccagagtccttatgccccacactacaccctaactccaaattccatgtctccagctctcggaaacacaggcagctgaaagcatttctggagtctgctcttcccagtcccagccaccatcacttccctctgtagagtcaagactcttagcttatattgttttcattatgaattgtaagatacaggtggcttcctggtgctgggaggtagatgctcttgtaaagatggccctgataactccctgctcctcacaaaagagacacagaattacaggagaagcaatgcctctcgggagggaatctcttttctcatctttgcccacagcctgagctctgagtccctctgtttattttctctcagtttgtgcttaaacttgaatgtcctacagatcttgggtctctttaaatcctctcctggtatctgagagcccttggcctggaaaggttgtgtttctcctagggctggcttcacagtgtgtgctcagtgaggttgcacagggcccaacacttcaaagggctcagcatttgaggtttaatgctctggagtggctgtcttgaaattcttaataaatttatctctgaattctgtaagtcagtcaaatgggacaatggagcatgcacttgatccagtgggggcctggagccacagctcgcgatgcagtcctgtatactgccacctttctgccttcccaggacaggttctcagccatccattccccatttccaggtgccccaggtctacctggccttccttaccctatccactgctgtggctgctgtggctgtccacctagggcagtgacaggattgtgtctatgaggaacacctatgttccaccactggcaaggggtcttatgtatgggaaggttcagagttagaaaagagctgttcatggcctaagctggttgtgtcaggacataattggttaggtgaattggtgagagctctcgcctacccctaatttttgggttgggaaggtgggcatttggttaggagaggatgacttccccatgcctggcaaaggacctgtattctaattttgtcctaggacccacaatttatgtgtctttcctggtctcgtctagtatgctatagacagtccctcttagttgtgactttgacaaatcctgtccctgagacatcttctaacagagagaggagaggaatactgacaaatgtatcttgagctcttaaaatttgtgacatcctgtgcctaacacttgctattaacaatctcatttcattcttacacaaccatagcatagaaattctccagttagtaccattttatagatgatgaaactgaagcatgaacattccagaaatttcacaaagtcttatagcccagaggcttcatatctaaaattcaaaccaagaatccttttatcagaaatccgtaaagttctgcgtcatgtcagatgtgagctggaccaacaccaaaacagaaaagaagtttcacatttcagtttgaaatgaagatgtggctttttcagtaaagagactagtatttccgtggctaactgaattaacctgtgggctctaggtaagtcctaagcacatctgggaaagaataaaaggaatatttaattgacctcaggagtgctttagaagatcatccagacctatcaggacatcttctcagggaggtgggatgagatttaggaaccaacaagcagccatataatctcgccaaacccattagtggtcctgacatggctggagaccctgggatcctttctcctggcatggtagactaaaccacttgttggctctgttccccaccctgtgccgcctggagcaggggaagcagatggtttcaatacaggcagaaacagctgttcctcatatggggtgagctgaatcttgattgttttaggttctgctctttacattgacccctcaatggtcctagttctgaagtatataagcgggccctttaaaagactttcctaaggcctgaatgtcaaatgaatcataatctaggtagcaagattgctcctaaatggacatcacagtggctgaaaacaatcaagggatggctgatttagtagggccatgctcaaatagggcaagtctctccccaaggtaaccagagacatcctcaatgcatcagcaatcttggaagctgtactcatctgaaagttcaggctttgttggacaacactcctgtccactggcacactcacacactcactgccatacaaccctttctcagactgagtccattagtagtatctacctgccgtaagcccctagaatcaaagatgctatgtggaaggcttggacccaaagacagcattggagacttggtcttaggtgagcaagggtttaatctgactaggacagccatgtcagaggccacatctgataagtgaatgaattgcattccaggctctcaacttagcatagacctcttcacctcattatgccttgcatggacatcaaactgaacaggttcccaacattctctcctggggagagcttttctctcctttgccacaatgcttagggtattaaagctgtagagatgacctcacttttagcaatgaatcccccaaatgtgtacttcccagccaaccagtttatcacttatctatatggtgatacacccttctgttattttcaccaaagatccttggcacaaacactgaagccaaatttcccatacaatcctagagtttaagtaggatgcaaagtcctgtgtggtttctccatagtgcagtctgtgatcatggaaggctcaagttcccttcagcacagggacccaggtttgggtatgcaggtagctgagtttttccagctcagaccataattgaactgtgaattcagtcagaacctatttgtaattcacagatttatatactaccctcagggaatcaagatgttattattgtcacatgtgtagaaatgtatttatatgaaatcgtcttcctcttctccgagttattttccagactattagcaaaatttactcagaagtaaaaggcacatcaattagctgggcgtggctgtgtacacctgtaatcccagctacttaggaggccaaggcaggagaatcgcttgaacccaggaggtggaggcagagtgagactctgtctcaattaaaataaagaaaaaaaggaatatcaattaacttctgagcagtgttcctgtccatatagaaaggaaacctaatcctgagatataagggcaattactcaagaggaagttccatcaaagttgaagtttgaatggaatgaatgagttaggtaaataaagggtgagaagaagctagcatgtgaaaaggagaaaggtttttggcagagaaaatggctaatgagaaagcctagaggaggggaagcatggtgcatttggaaaatggtaaaaaagtcatgctaataaaaatgtagggcatgtcttcaattgtaactgcattaagtggaagacagattggtcatttcaatctcccaatagtttttatccaagaagttgttttggtcattgaggtcaggtttcattttagttgaaataatattcccaagttataaggatccccaaaacacagagcactggattaagaaatcaggaaaaagtctgtaagggtaaaggtgtacagaatgggattgaggattgagggaaagatttaaattttgggaaggaatccaacataacaatagatgaggcatgttgagacttagcaatttttaaaatagttaggtctaggagttaagctcttagcagagtcaggttctggactggctgtactactaacgaagtgctggtccagttctggttgcaatagatctgtcaatttctaggactttcattagatttagatgcagttacatgcagcctcaggtgaaagggtgacctctggaaattgaacctggaaatttggttcagatgttacactaatgttctctaacactcagactaaaaactttgtatgcacttcttcttgtcacctgtggaatgcaattaccaaggtatgtttcacttcttcattgtctcttggctttcttccattacttatttttttttgagacggagtcttgctctgtcgcccaggctggagtgcagtggtgcgatctcggctcactgcaagctccgcctcccgggttcaagcgattctcctgcctcagcctcccgagtagctgggactacaggtgcccgccactgtgccctgctgatttttttgtattttttagtagagacggggtttcaccgtgttagccaggatggtctcgatctcctgacctcgtgatccgcccacctcggcctcccaaagtgctgggattacagtcgtgagccaccgcgcccggcctcttccattactttttatcctgattaccataattatcattacaggaagtttgttatttgtggtctattgaccttaaaatattgtagataaaagtacaataaagctgttattttattaaaattacagaaaattaaaacaaaacggagatgaatagatttgaaattcagttatctcatgtaactcctatttataattactgttttttttctctaaaatttcgtttcatacaccagttaaggcaagctaattttgttttctcggttttcctgcttatttgccccttattgccttttctcatactatctacttaataagaaattctctctgtgatatgcacccattgtattcatgcctgttattcaatgtgcacgaagcctttcttaatatttccattcatacattatttttcttttcattgattctccattacactttgcatatctgttaacatgctaaaaacatgacgaacccatgatataaatgattcacttgtgtgagatcctatgaggcgccatctggagtcccaggaaggaataaaatagccctcatgtcattcaaatttaagccctgcttcatctgaaagcaaagccttgcctagggcacgcccattccgttacctgcatcagtgactgatcagaatggggtaaggcacgccattccctgttacctgcatcagtgactgatcagaatggggtaaggcacgccattccctgttacctgcatcagtgactgatcagaatggggtaaggcacaagccattccctgtttcctgcatcagtgactgatcagaatggggtaaggcacgccattccctgtttcctgcatcagtgaccgatcagaatggggtaaggcacaagccattccctgtttcctgcatcagtgactgatcagaatggggtaaggcacgccattccctgtttcctgcatcagtgactgatcagaatggggtaaggcacgcccattccctgttacctgcatcagtcagtgacagatcagaatggggtaaggcacgcccattccctgtttcctgcatcagtgactgatcagaatggggatatgaacatccaacctccttactccaaatgcagacaactttgaagtgtcatctgagcacaagagctccttgtagaggaatgtctgagcacttcattgaaattgtatcacagcacaactcttccccccacgtaatcctgcctccttttttcttctgcaggtgttaatcctaaacatttctccaataaatgctctatgtgttatctttctctcataatgtgcttcttggagaatccaaactgtattgccattccttcattcaaatatatacggaactatttgtagggcaaataataactgttttgtacccaagacatagttctcaatgtggttgaataaaccaagtgaaaacaaaaattatcctgctcacagggatctaggatgagagattagttaaatccgtgtaaagaaggcaccaagtgatttacatgtatacagatgactgacaatggaggctcggatgtggaaatctcctttatatgtttcctatctctaagataagaagctcttttaaggcatgagtatgtgctgcatctagtgacctgaaaaaaactgacactcaacacgtaattgttaaattgatctcatgttggtttgctcagcaaaaaaaaaaaaaaaaaaaagaaagaaaggaaaaaaaaatccaaaagaggctcccacaagagaggctccctctcgcaatgactgagaataaccaccaattaatttgaatgacattttatctgtgggtttatttattaaatacattgcctagatttattgaaacaataattatagctaaataactgtgaggcaaaaatgtcagtgctaaaacctgaaaaaagtgctgaggttcacactgaaaggaacaacattcataatttcaaagactctcagattgattggttcagctcccaagacaggcaggcactgccctccatttataatcacgcagcagctattatattctgtattttttcaattctaatttgcttcatctctaacataacctctctgcaaggctattgcacaagacatttatttatctagttttacagcaagttgtttaagaaattttgagatggttatatgggtcacttagcacttagtctaaaggaaagagagttgtgtgtcagtgtcctgcagtatcattttatttaaagaaaaaaatacctgtttttaagagaagcaaatagtagtgtggttcaataatctgtatatgaagataaataattaaattgttaaatgtattgctaaacaactattatttaagttttgctagacgaatataagatagccaaagtaatttacaaagaactcgatttcactgaatgttgggatttattaaatacattattctttcttttaacaccattcatcaatgtgacaaagaggtcgtagagagatgtttgtttcaaggaagtaaatgtatgcattgaaaactagagaaagagagtaatggtgattactattgattttcaggaaactgtattcagtggtagaatcaaaactgagcaattacatgattaaaatacattttgaatcccccaacatgaaagcatgataatcataagtttgcatccagagccaatatgtcataaacatttgaattttattcctacacctaccaccccctgcaaatgactgaggaaggatgtgaggttttatttctattctctgctgtttgttcaattcctttttgaatctcttaattaaagacagttgattaatgactcacaagcacttcatatatcaaaaatgtcaaagcacattattacaaagagatgtttttatatggttagatatggacacctacgtttctctttcattctgataggtctggcatctactttgttaaaatagtttttctttccttatgaaatgcaaaaacaatctgaaatgaagacatcattccaaaggctcagtgtttcaaaaataaaaataataatcacatgcacattacattaagtacctacttacccttttgttctaagtgaatcttggctctgctgagaatgcttctctttcaatcctctcaaatgctaatgtttttttctatcttacattcttcatactgtaggactcagagaggaagaaaaagttattgctctttattgtatgtcagacctttctcttttcctcgtgttttgaatctcaggtcacctgacaattccagccaaaaatctttccttttgcagtcattttcccaataaccccctttttccgactcaaaaacacattccaaggctttcttgaagatttttgtacctgagtcactgccatctcctcaataccactgctgttacaatttatgtcttatatgtccataacaatgatccttccaatcaaatggactcttactatcttgactttttttctccagtaatcttgatctcaattctaatcagtctttcaggctattcccatttcttacacagatataggccttgctgtcagcaataatgacaactttttccccaccccaggatcatttatacattatacattatacattaactctctaaacatcaccctttatctttccagaacatttcccaaaatacccagcctttcacacctcgacggaatcttacatgcaatttccctggtacattttcattgagagtttgcttcccatggtctcacgctcttctcaaaaaagttaaatcccatggttcatccttaaacaccatagctgaatcgtttaactgtctttggatcccttcttttattttgcttctttggcaataatctgacactttatttatctctatatagttgaatgtggctggagaaaaacactaaacaaggtagtctggtaccccattactttcatgccatttacctaaagtggactacagtgactcccagccacagtccagcatttccctggtccagtcattctcccagtctactagacggctgcttcattaccttgcccactgtcttcaaacctccaaccctacacgaaatactcacatctgatgattttgcttcccttcatactgaagaaagaaaaatacaaagaagattcaaaaatacacaagctttcactactactttgacccaatgaactggatcagtgcattacattgttttactctcttgtctctttagataaaatatctcagctcctataaaaaaaataaacatttacctccattttgaactgattccattctcatcttctcaatgacattatcctggaaactctctatatagctctacattttcatgctcagggaagtatacccagtgaggcataaaaaatactttcaatatctacaacctgaatcagtcaaatcagctataatggaaaatacttcactcacaggaagaaagtaaccactcgatgcccattattttcactgatccaatcagttctccggctgcactagtcgaataggataaccttaatcttagactggtgagcaatttatggtactttgatatcttccttttaggagctttgggcattttaaattgatcatatagtgcatggcatgcagcattagaacaaaattagaatagatttgaatattaagcaaagggactggagcagaggcccagatatcaccactggaggcatcaaagggataaaactgtacttcatctcctccacaggagcatgcaagcgtttgtggttgtaggtgggtgcctctgtactctctcccaaacagcaatcctttctgctgttacaaaatgcaactattccttttggggacttccaagtcctttatggtcagtccatatgttgtgattgcactgaccacaaaggtgatcataggaaagcgtataactgaggatagaccaaataaattcagtcttatgattttatctggtataatcagaagagaggaagactttttcactggagatggcaagatagtggagtacatatatggtgtttccagcgactattttttactactatatgtaaagagacatctgttaatgaaatcagtagatctaaaagataatgaaagacattgctgaggatattatttgagcatctggacttggtgctttctaagtcattcttccctgaattttcagttgattgtgacaagagttcaaatttgagttaagtttccatcgtttaatcaagaaagagtcttgattaatccagatataaagataaaatagaagagaaatggacggtatccaaacaggctaaagtgatagaatagtggcttcatggcattgtttctgtaagtaacagctgaccaacaattgttatggttctacattatttgtggttatacacaagatagtttgagtttggcatttggaaaaagttttcccttttacaatttgaaaaaagaaagtatttatttaaacagcaaatagtagactttattaaaccatatgaccaactcactcatcaacctctttacctgacctttttagataacttctccctccctaattttcagagcacccacattacttaaattgctgttgcaagaactgataattgtggaggttattggttattggtttaggaagagaaactgaataaatctgagctgattatttctccttctgcaaagtacgtccttctggtcaatcctatttattcaataattggctcccagctgaagttgaagatcctttcaaaggaatttaaaacttggaattagggagagaaaattatttggggggtatagttgcactgaaatatctacatcttatgtgtttttggttgccttattctaatgtgtagagagataggttgagaagaatggaacaaattgcagagacatcccaaagaaaggctatgatgacctccttgtttccccacaagatctaggtctccagttgtattcctgaggccctgaatgggatttcctaaaacacttcaccatccttttaataaatttatttttctgcttaagttttagtgaagtttattttatttcaaccaaaaatagtcctaatcgtaggacaatttaccatgtgtcagtaaagcataagatgcagtaagctgatagatataaatagtggcataaaaactctgtctcaataaaagcatttgatcagatttgtcatgatgtttttataaacaagaggagaaattgggatgatttaaatcagggactgttcttaccatttctgtgacagtgagtaaacgatgctggttaatgatgccaactttttgatagtttacagccttatgttactgggttgcactctcaactttgtctcaacagtttttagcttaataacttgagtgaggatattgatagcacgttcatcgaaatcaaacataacaacaaatgggaggttagtagaatttttattttttttaaaaaaatagcatactgaacagtatattaaaatttgagataattataaaccctttaattataacaaaaaaatccccaagacaaatacaagataggaatagatgaatctaaatagcagaatatgtaaaatagtattgatcattttgaataaaattaagctcacttacttcagcaatatgataaaactattagaaatgctcaagcagtgttcagcactattgataaatgtattgtgcccaggataatgtcatagttagaagataaatgaaaagagtctttaagtaatagcctaatatagtggaatatatgttgagaataatcatctggtttatgaatttgtagtaaatattgcatgtttagaaccaaccattgaaatattaggattggttattgcgatagtacaaatactaaaagaaagttgtagaaggaagacctaaatgtgggtaaacttcgttagctgaattttttttattatactttaagttctggggtacatatgcagaacgtgcaggtttgttacataggtatacgcgtgccatagtggtttgctgcacccatcaacctgttcatgtacaaaatgtataattacatatctggcctatttactcacttacaccattgagccctactataatgattgcaagttcattttaaaaaacctaatctaaaatgacaaagggagaagatatcagtaaaataacataatacagctttgaaagatggggacatttaatagagggagtagttaaaatctaagacctacaagaaggatctacaggaagaggctacacatggtacctacccaattttccccctaaatccctaagaggctccagacttcaactgtcaggtggaccagtgaggtgaaatggaattagaatggaagacagacaggaaataagtgtcaaatttatgttaaaaaacaaaccagtgcatgcctacgcctagccaccttttcctcacagttggatgataatcttttcatctaacctgaagatttttgctgttttcaattaatgattaatgaattagttaatttaatgcatttgtcaagctatggagaaggtgacagcagaatgaaaatataaatcttgctgctatgggtctggacacaaggcaattaaattcaagtttacaaacaaaactttggaagcttttgccaccttctctgcaagagagattgatacatactatctccattacacaaactggaaaaaggtctctcacctttttctcattaatgtactatcattaatgtattatcattaatgtactatctctcattacacaagctggaaaaagaaaccagaagaagcattcttggaaaataaagttataacatggaaaaaaaggaaccatggtggtgtgctacgtgcgtataaacaatatgtgcatagtcatgatattctaaacgttaattcaaccattgattatgatattggtataaaagaacaatgaaagttgggaaattgaattgaaagtactttaagttttagctttttttacatctccaccttaccacatacaaatattttctcttccccatactcctagtataaacatactataaggtttgtccaatacttattgtttaaataattatggctacctaaatatgtttattaccaagttgctaatgtacttccattcttatttattgcttttgttttactggtgttatcaattttgcttatttgtttggttaatttctattttcttattactaaatcactttcaaactttctaatggaattctaaaatggctagctttttcttagtacagttcaaaaattcatatagtacataaatctataaggtatcattggttccattttgtcttctttccttgatggttttcttcttgaagtttttcattatcatgttccagactgagctggctgatctccagctggccatactgctgttattctgggacttctctttcccatttattgtggaattctttttgtgtttcttctctgttggctaaccatttcttggctatcatgtatttgtctttcttgggtttgtctctaaatttggtggagcataaccttcagaatcttcctgagaaagagtgcttaagaagtaaacattctcaggacttacctgcctaaaaatgtctgtactttgccctttcccttaattgactttttggatgtgtaaacagttctagattgaaaatcatgtaagccattattttattgtcagcttctagtattgttaaaaaacaatcatcccagtttacatattcttgcttttttctttatagaggttccagttttatttttttcccattgattttgttaatttgataattttttttccattaaacataaattttcttagttctggaaaaagttattttattattcccttgctatctttctcttcttaatgtattcagtttcccttcctttggtatatctatagatacatctcttgatttctcttctgtttttttcttttattttctcttcaattttcaatttctattttcggtgagagattattttcttgagctatgccccagatgaaaatatcaccctgtagttgtaaatctttgcttttctctccatatcctaactctgttgtttttgttgtttcttatctgatttcataaagtcaggggctttgtctcctttgtactatgcctgttatataatataacttcaagagcctcaagagcctttttttaagtaacattatctcttaaatgtatttctaaatttttttggttaaaaattcccattgtcacatttttaatttccagtggctttttctttattctttgaatgttccttttatagcaacctgttgttttcctatggatagaataatacctcttctcttttaaggatattattaggttttataagtttccctttgctcactttacagtctaattcttttccactgagtttattttgctgcctatttgattgaattcaatcttcgtgttgtgtcctttctcaatatttggtgatcttggctttctgtttatatttaagagaagggtgaaaaaaaatacatatctgacatgagaccagtatgaatgggctgggattatgggctgataagcctaaggatcacctgttggtaaatgggcactccacttagattcccttaaacgtcagtatcatatgtaatttctctcgtactagatgtccatatttttcctgggttctgaaagccttatttggagttttctgagggttcatttggggaaaaaataaaaacaaaaaaatgataaaaaaataaaaccttagattttccctagtatatatgtagacattcttaaagttcccttatctttagtagatacttcacccctgcagttacggggacctggtagctctgagtttaagtctttatgactaaatcttaccagagagtaaatttcctgcctcagaatagactgactcaatgagttggctgaaagtttccaatattctatttgctgtttttgcaggcttttaatcattaatcttattttttttttcaaccttaccagcacccatttctgcagaaatactagttcttttagttctgagtttcttctgggtttagaggtgcatcacttggctttttattggcagtaatgtttcagatttgcctactctgataagtcagtatcttctcatcttcctagttttcagcttcaaaacattgttgctgttgtttatttattattatcactctatatccaatttgctcagtcttctttaatggcttaccggagcttttaggggtttagttaaaatgaaatcatgtgttctttttgccatttttttattgtcagtctaagcctagaaataccatttgacccagccatcccattactgggtatatacccaaaggattacacatcatgctactataaagacacatgcacacgtatgtttattgcagcactactcacagtagcaaagacttggaaccaacccaaatgtccaacaatgatagactggattaagaaaatgtggcacatatacaccattgaatactatgcagccataaaaatgatgagttcatgtcctttgtagggacatggatgaagccggaaaccatcattctcagcaagctatcgcaaggacaaaaaaccaaacactgcatgttctcgctcataggtgggaactgaacaaagagaacacttggacacacaccggggcctgttgtggggtcgggggagaggggagggatagcattaggagatatacctaatgtaaatgacgagttaatgggtgcagcacaccaacatggcacatgtatacatatgtaacaaacctgcacgttgtgcacatgtaccctagaacttaaagtataattttaaaaaaagaatcaataaataccaaaaatttgaaaaaaaaaagaaattagaaattaggcttaggaaaaaacagctaaaatgcttcaaagtagctgtttctatagctagagactgtggttataatattgtccttgattttatagaagtcttttagtaaaatgtgacatctattttcaaataatatgaacatattattttgatagaaaaattaatgatttaattaaaaaactggtaaaaattgtattttttgaactttgcaagttgttttttcattgcaattttcagacatggttggaccaaaaaaaaaaaacttttttaaaaacaatttgctggttacataaaaatcattccctaatatcaatttttgaataatcacataaaaaatgaattagttgcaaggtggttctaacagaggcagggatttaagcttgtcaatccttcttcttctcggaattatatatagaatttagcaaagaaaattttaatagaatcaagtatttttattaattattgtgaagtttacacctagaaagcttagataataggagctcaaatcaagctttccttgaagtgtctgcagagatattgatactgcatgcttatagtctaatctgagtgttccaaagaatgaagtaactgaccagactttggtttctgcatttgaaaattagcaactcactgtaggttcaatacgttttgacagattggcttttgtatttttcccaaatattaaaacatagcttgaaaaatattgaatgattgattctacttttaaaagctcagttagtatgaaatgccagagattgctgaatgtctaaagacattcaaatacattgggggatggaagaagccttacctgcttataagagagtatgcctctggccaggcgcagtggctcactcctgtaatcccagcactttgggagtccgaggcaggtggatcacttgaggccaggagtttgaaaccagcctggccaacatgacaaaaccccgactctactaaaaatacaaaaattagctgggcatgttgccatgtgcctgtaatcccagctactcaggaggctgaggtgggagaattgcttgaaaatgggaggcagaggtagcagaattgcttgaacatgggaggcagaggtggcggttgcagtgagcagtgatctcgccactgcactctagcctgggtgacagagcgagactctgtctcgggaaaaaaaaaatagtaatgtgtgcccaaagactttttcatgagcaaactaataaactagacaaccaaccaaccagacagtcaaaagacatacgtgtgttttattattattattattattatacttcaaggtctggggtacatgtgcagaatgtgcaggtttgttacataggtatacatgtgtcatggtggtttgctgcacccatcaacctgttacctacattaggtatttctcctaatgctatccctcccctagcccccgacaccccaacaggccctgatatgtgatgttcccctccctgtgtccatgtgttgtcattgttcaattcccacctatgattgagaacatgtggtgtttggttttctgttcttgtgatagtttgctgagaatgatgctttccagcttcatccatgtccctgcaaaggacatgaattcatcctttttttatggctgcatagtattccattttctttatccagtctatcattgatggacatttgcattggttccaaatctttgctattgtgaatagtgccacaataaacatatgtgtgcatgtgtctttatagtagaatgatttataatcctttgggtatatacccagtaatgagattactgggtcaaatggtatttctagttctacatccttgaggaatcgccacactgtcttccacaatggttgaattaatttaccctcccaccaacagtgtaaattgttcctattactccacatcctctccagcatctgttgtttcctgactttttaatgatcaccattctgacatgagatggtatctcattgtggttttgatttgcatttctttaacgaccagtgataatgagcattttttcatatgtttgttggctgcataaatatcttattttgagaagtgtctgttcatatccttcgcccactttttgatggggttgttattttcttgtatacttgtttaagttctatatagattctggatattagccctttgtcagatggatagattgcaaaaattttctcccattctttaggttgcctgttcactctgatgatagcttcttttgctgtgcagaagctctttagtttaattagatcccatttatcaattttggcttttgtttccattgcttttggtgttttagtcatgaagtctttgcccatgcctatgtcctaaatggtattgcctaagttttcttctagtatttttatggttttaggacttatgtttaagtctttaacccatgttgagttgatttttgtagaagatgtaaggaaggggtccagtttcagttttgtgtatatggctagccagtttttccaacaccatttattaaacatgttctttttatttataattttattcctatctcaggaaactgtgcttcacattggccacacgtttttcagtgcaatgtgttatgtgacttggtcaatattgcctggtcattagtgaggtctgcattttcttttcttcctactcttcctactcttccttccttcctctttctatcctacttcctgctctttctgaacattgattccttcacttcccatctctaatatttaatggcacagcagaaacagtgaggcttttatttatattcttttcagtgaggagagaaaaaacaattcctaactgaaaacttagtaaagtaggaggcccatataataagtcaagtcttcaaggaatcagagagaacctaactaataatctggcctttccctttgttggcgggaccttgcaatttggaaaatggtggcctattcattcactcagcaagggtgaatacagcacatatataaggtagtgattattttagcattcatagcaaatgaatatcttgattcccaataaatgcctggcatctcattttgtatcagtgaaatatatgtaagactacttctgaatgatacatgattgactttttatatttgaaagagtgtggacaagggattttctgaacactttgtgacatggttacttttttaaatggtaaatttatggtaattttcaaaattgtgaagaagtctagaaaaaagtagcattgaaatataaaaggatgttctcattaaaactttgagaagcatatcaccttgatttaaaatttaaaatgaattatttaaagtatttcttcagactcacagaccctatcctcttgcctaatcttattttagaatttcctgacttaagtagaaaaaggctgtattttgaactctgttcaaaggttaggttttgaagacctatggttcttcaggttaaatatgatgattatacataatatctatcaacattaattttagaatttgacttattttttaaaatctacatggatagatttacttttgtattggtaaacaaagaacctaattacatgtgctttcccaagtctatggtttccatatttgattgtttcatgtgaaaatgcatattttaagattcattcttacattcacagatgtatgtaaaactatcttgcttgaaaatagtgggagtgtctcaaggcataaatgcacgtttgatcatcatatttggtctccattttaaagatggcattgctttgtatttactaagaaaacactgtaaatgttcagattatgaaagagacaattttagttatttaattaaattaacttctttaaagaggaagtgaagggtagatatttttaaaattattctttaaaaattctaaaacagatttagcatttgtttagcatttgtttaaaaatttctaattttctcaaaatatatatgaactgaacattttattaagaaattgttttaattacttagaatcagaacagaatgctaataaacaatttacaaccttagaataatatatttaacataattgagtcttttgtttgtttgttgatttggtagctgttaactttaaggtgcagatggtgaaatagactctaacagtgctttattgctcacactgtctctagagttttaagttccaattgcacctataaaaaggggtaattagtcctttctgttttattgctgttaagggaaaaaaagctgtttcagttaactgccaactggatactattctagattaaaatcctggtatcagtaacttcttctccttttcaaattccaagtcaagagttcaaaacatgtgagaaatgtcaccttcttaaatattacggtctattaattatgtccttgtagtgaagtttattggtgcaattagtcgacaggtaggaatatcagtctttataaaattatatgtggtggggacaaggttaatactaatttcataggcattaaggatatatttgagtgtattcagagataagcgaaccatgatattagtaaaatgacatcttttgatttgtttaaaagtttgaaaataagaacatactcaaagactatttttcttcacaaatccagtagtgttggcagattgaaaatgtgtaattataattattttccatttagacatgtattattttgatagcaatttctcagtaatatcaaatataattacccaactctagaaagtaatttcatttctccctacctagacatgtggctataatataaaaagaatgataaacattttgttttaatcaaaagtacaaattaggtattctagcttccaaaataattttcaagcatgtcaaaaaaattcatgtcaagtattagcttaattatttttaactttagtgtttagtgccttataggtaaagtggcttaattcacagaggctttgagatatttctgcataacttttactatttcaagatgtgaaaacaaagaatcccaaggaagatatataaattgaaaggatcaacatgccacataaccagtgatggcattagcatttgtttgtgaattatattaatggttataattaggataatttgagcttttacattagtataatgacagtttacttgtaatgttttagtctatgttttaattccaccaactgtgaaatggaagaaaatgtcaatacaaagaacaaagcagaatttgcataggaatggaaacaactacatcaagacaaatgaatcttgaattagctcatgagctgaataatgtcatgagtttttgtacttgtaaatttattttttaaatccatatgtaacacgaaagattgataaagacagctgcaattttaattcaaataagatcagctatttggcagaagaggcagaggaaagaaaaatagatacaatgatttaagtgaagtgagaaaatcaaagacaaagtgaagcacaatgaaatcatcatgtaaaatacacattaaatgtaacttcattcattttagaaaaaaagtttgcttagtttgcttttcaatgtgtctagcatagtttatatgtattaaaaagttttcttagctatccttcaatgtggacataagaacattagaggtaaaaacaatttttgcttaatttcctgtttaaggaaacttagtcctgtttttgtgttggtcagcattatgctatcagcacaatctattttaggctatgtgctattttgccttttttttaagagacagagtcttactctgtcacccgggccagagagcagtggtgtgattatagcttactgcagcctgaaactcctgggctcaaatcatcctctcacctccgctttctttctgagtagctaggactacaggtgcatgccaccacacctggctaatttttatttattgattgatttttggtagagactagctctcgccatgtggcccagggaagtctcaaacttctggcctcaagtaattgtacctcagcctcccaaaatgccgggattacaaacatgagacaccatgcccagagtattttaccttttatgacaaaatctccccctggcatactaattcctacttggtttctctagtcctcattccctgttgtgctatacctaacccagcaaccacagctcaactgatcacatatctacactaattattaataggggccatctacaagttgcctggatcttacctactatctattgacagatgcctacaataccagctcattcacctaccagtgtttcagctggattgttttcactgaatctgcttgttgttgtcttgtgtgaaaggtccgctacagttaagggctgcctgccaagctgttcctgtagccactgctgttaggctcataaattgccttctctgtcttagtggggggtttcccactctattgttaaaagcatgccccactccgttgcttgatgaaattcaattttatggacaatattcactgattcaaaaatagttattgatctcctttctaagcagttataggtgctaattatataatgatgaacaaatagacatagtacctgcttacctgaaccttcattttagtgagctgtattatacacacataaacagataagtacatatgtaattaagatcttaatgtcataaaaagataacaacctggatgttgtaataaagagtatgagaaataactgaatttgagagggcagtctctgtaatttagactttttgaagaattatctattattataattaatacaattaacaatcataattattatattattactattattattattacaatataatagttgtggacattttattgaagtaaaactctaacaagtgacctttattgggagcttaaaatatgctacatactcttctaaatgtcttatatacattaaatcatttaatacagcaaacacatctatgagaatggtgataatacctctgtttttacaagtgaagaaactgcaatacaaagatgatgtcacctgcctaaggccacactgctagtgaaagtttgagagggaatagagcgaaggtcatccagtgccagtgcccgtatttttaccacaatgctataccacctgtcaagaagctgagacccaaacctcacctgagttgaaatttgcaaaataataagaattctgccagtgtactgtaaatagaaggaaaagcacaggaaatgacaatcacatggattagatctggaacgtagtgactatgggtgtgggcagagtagctcaaagtaaggactaaggcatgttcacaggtagcaaggtactcttagcaggccattcacttgatccactttatgtcttcctatttgatttgctttgctttatttagctttgcttaatcattccaaggttttgcagagaatattaattgggaggaagcaaggacaaattgttcaagaagaattagtgtagtttaagaaaaaaacagtgatgatctccactagggttgtagcagcagaaatgcagaaagttacgcagaacagaattacatttgaaagaacaatatatatgtgggactatgtgggaagctcttatctaataggtacagatacattaaaactaaaatagaaatcctttaggaacattaaatattctggattttaagaaaatgggccaatacttttgctaactggatgagtgtgatagctaactaatacagttattaatagaggtaacttctgaacctgttgagaaaaaaataagcaaaataataaaaaagtaaagacttataaacatatagattaaggaaaacaatagtataaaaatatttttgtaaatttttctgcatgcttatattataaaataaacgttaaaaatattaagaacttacagacgtaattaatagcaagaggtttaaataattaatcattccagattcacttgacagatttaaatataatcacagaattagtgggggaaagaaatggagtagctgtcacatacttgaacactgagaaagcattttatacaaactttagaagttttacttgcacaattaatgcaatagactgaatgtgtacccctcatccccaatattcatatgttgagccctatcccccattgtgatggtatttggagatagggtctttgggagaatattagatttagatgaggtcatgaaaatgggccctcacaataataaagaatgggtgcccttataagggataagcacacttatgagaggaggaagaaacaatatggctggctgtctctgccatttgaggacacagtgagaaggatgtcatctccaagctggaaagggagcactaaccagaacccaaccataatggccacctgatctctgacttccagccttcagaattgtgagaaaataaatctctgttgctaaagtcacccagtctacagtattttgttatgacagcccaagctaattgaaaccgtcaattttttagaaagataaaaataaagtgagtaactttagatagagacaaatggccaataccaatccaatgaagattatttttggtagttttagatctaagattatttgaatctaaattaaactaataataaaaaaatcaattcaacttggaatactctaggcattatgcttaaaggcttcaagaagtgacccataccaatgtatctgagaggtcaaacattttacttgtatgaatagactaggtgtctctaagggaaagtgaaagttggaattaatttgagaaaattgctagtttccagagaacagcaacaatactttcaacataaatattaatgagtagcataagtatgggaaacaaccctactgagtatgggaatggattgagaatctttctaaatagtaaaacaattagtagtagtcagattgatgagaacagtatatgtacagatgtctgttttccaaggtattagactgatattagcaaaatatccattcttaagaacagcttactcctttgaaacatggcattttgaggactgtcatcctatacttggaagatgctaatgttttagcatcttggcaatgcttgacattcttgaggaaattttaaattatattattttccagtattggaaattaaaggtagatccgtgtgctttgataattaatttaagagaggttaggactggcaatttctaatgaaattttaaatcttcaattagggcagaaccaaataaaatgtgataacacagaaatgtgtcttaaaatgatccacagggtaggtcaaaatttttctcaggaaacagtgttccattgcagagaaatgtgtgtgaaaatttttaaatattatgtgattccttagagcatagcttctcttatattagccaaattggtcataagggggctgaaatcaattacaaaccatagtgattttattttgaggtcattttaatcctgttagagtaaaactttgttacctgaatagagatgtatattcacatagtatttattatctatacagagagctggagtgagaagtaatgaatctcatttatatagaaacacatcaaattgcacatattcacaataaattcttgatttatctgatttaagatttttatagaatctgtcaacatagtactcattacttccttatttcttataatattttatagccattaatctttttttagaaaaaaatattaaggtaaacttacctctttgcccataataggtgctatccatctcaccatcctaaattaatgtatattaatagtttatattatttctaactcttttataattataatatttaaaatgaagttaattttttaagaatattgctcttaggctaagttgaaaattattttatgtactacacataaatggcactgaaaaatcaattttttgaagggagagagataaagaaattcaactaaatttaaactatcttcaacattttccatatttgtattcaatcgcaagtaggttaatcacttgcttaggctgtgaatgacttgccttctactttctcaggttcttagaatgtgaaaataatacggtatttgtttcttctatggtagacaagcatatatacttaatgatttgttttgtttactttattttagacagaaagttttaaaaatgtataattggtattaaagtgagtaaattctacttttactgaaagtttatttctcattctaacattttacctatgtatataatacattgaaatttggtttaaaatgtcactatgaagtccagtcataaaattataaataggcacctaattaaatacgattctaaactcaatgaataaccttttatctagaaaagatatcatgaaatgaactttgaattaataacaaagtatagcaaaaataaaatcaacttattctaattatgggtggcctttggtttacttaactaagcatatgcatcaaatacagtatcaatatacttagcctttggtgacagtggcaggttcaaagtatttgggggcaattcttccttctaatgtgttattggtcatgacggtgcagccatgtatctgtaataaggattgacagagtaggaagggaacaaacttataataaaagaagaattggataaagttaactgtgaaaatatgctaacagaataagcatcaattagtgtagagaagtaaaaccttgggggagatgaattatattttatgaccactgataatggattctgagtaaataggtttacatttcactggggaaggttattgtaaattgaaaagatgcagcagaaatgcagttatataggaagaagagggaaaatcatttaatccgatgagtgtttttatgagaaattttgactcatataataattattcagtataagtggtgaaatattataatacatatttggaatttgaaaactggtaacaagtgtatcaggataaaattgaaaattatgatatatggcctttttgcatctaaactttcagtagtaattgatttaattttgttatttagagcattagagaaaaaaattatttcctaaggtctaccaatatatacacaaactccttcttttcattgatataacaaatatatatgcataacctgtcatattaaatttcattcctgctttatgatgggcattataaaatgagttaactgattagcaatttcctttcttataatgctttcagaaaacataaacctgatactgcaattgacaaactcaccaaatcccactcttcctcttcccttagaagaaaaacgccagagcaggtgctacattatgatcatcagaaagccattctgtttaacatgaataatgtcattcagagggttagccatctgtttgctgagtgtttttcagacttacacccacagcagcacaaaagcaatgcatgtgggtgccataatcatggatcttccaaaaagcttttgtctcttgtaaaaatgaagtgagattattttaagaactaagttatattagaaatgcaggcacttaaatgctgtcttttttgttgctttgtgaaagattccagatatgtaaattaaatactgtttgggtttctgtgtgtaatttatgagcttaaaaaggagatctgagcaaattaattatagttgaaaaatgtgcatcactgagacaaatgcagttggttgtgcttatatttcttggactttatatcccattttaaagtgtaatttttttcagaatatttatattgtatttttactttgtattccatgtaagaaaactaagcaaagaatttcctttccaaatacagtaagcaaacattgttcattaaatattttcccagaaaataaagcataagggaaactgaacgaagagttaagtgaaatcaagattttctttgatgtttctcactctattgccattcaaatgttaattatagaattatctttagttacagtccactattttatcactacagcatagtgatgttccctccaggattaattcaggaaactcctaaaaaacgaattaacataaaataatatttgaaaaaaaaacctgtataacttcagtaagcacatcattaaaaaccttaaatgtgtgtgtatatatatatataaatgtatgcatgtatgtatatctatatatagacatatatagcataattcttcatgttactttagccacaatcattatatatttctgaagaaaaaaactctcttcctcaaacatgattgccattgtatttaggaaatgagtgataaaaatgttcaatctattttgatgaaatccaaacttatattaggcattgaaatatttgacaattagttttgaatatatttgaaagtttagaaagtgttttgagcaatttgaatctatccaatgcatttttaaaatatttttaaaacaatatgatacaatatcaaggaaatttccttgtaaattaataaatcatatacattaaattcagtaactgttggacagataagcataaaaatatacagaatttcctgatactatgatctactagaacctcattttaatacataaattttaaaaaaaactatttaaaatcactttatatctacctgcctagatctagtaaaagagtaacttcaggaagttcaagtgcttgcttaggacatttggaaccccagcatcacagcaatcattgaatatgtatgagttagtgtttaccggtgttagcgacactctgcttatgggaaatgtagagatgcatcaagggaaatgtacatagaaaagacacggtcgtgtttcgagactcttaaaggactacaggcaaggaggagaaacccattctacaggcatttcaaagtatgctaatacatagagagtttttgaatgaatctaatctacgtgagtccaatccactatttctagtctgcaaaacctaatttgaccttgattagtggaaatgaaggcttaaaaatgacagaaaatcagcacctgttaagtgatgatgtacatagaaattttaacttccaagaaggatattgatgggtttttattctataccataagctgagtgaaaagaagagaaaaagtgggtcagaactagaggtttgaaggtcactggaaacatgatgaaggcttgtatatatttacaggcatggaagaaaaaaatcaaaacaaaatttgtgttttctgtttttggaaaatgatcactttatatggtgagagcataggaggttaccactttcagttacccaagactgagatgttctttctgaatgcaatgatctgttcacttaggggactagtatgatgctgataaagggagcaattaatattattttaaaattatagaatatatgtaaaacaaagttttaggaaatgataagtctcaaattttgataacagctttcttgattaccccatgtaaagttattccttcaatgttcttgtatagacctttattataatagtaaccatgttgattcccatttatttatattttacatttctgatttctcttattaggttatctgttctctgaaatcagaacatattttatttcttcttcatattcccagcacctagcacacaatctactatataatatgcacaataatatttattaaatagatgagtaacaataaaactattctaagttacatatattgatactgtgcatattgattttgattaatttagaagtcatctaaaagttatgttatttcccttactctgagaaacaaacatcatttcaaataaaatagtgttgtactgatcttgagaagaaagtccatgactaaataaatagatgtggtaattggtttcttaaaacatatattttgtcaaaattcaaagtcaagtgaatgagaaatctgaagtttacaatatatgtgtgtcttataaatacataactcaataatcaaaataactcattaggggattgctacatttgaactggtggcacaaggctattattctcctaatgattctatgaagtttagtagaaaaattgaatttccttaattatatttatgatctccatcttacatgttaattttatcattacaatagcaaacattcctttcaattttagccagagtaattttaacccgaatcaactatgccctattagatttctgattctgaagatggagaatgagctaggttgtttacagggactcaaaaggaaggaattttaatacagaataactatagaaaagagaaaatgtggatgtacaattggaagtattggtcataaggatgaattatagtggttgcctattttacagagattttaacatacattaccactttatatagacaacgtttgtgtccccctaaaattcatatgttgaaattctaaccccaaatctgtctgttttataaggtagggacttttgcaggggattaggtcatggactcagagtcctcatgaatagaatgagtaccctcataaaaggaatgataaattacctaactggtataatgaacattactcaggagatggttatactgaaagcccaggtttcaccagtatgcaacatacccatatagcaaaatgtcatgtgtatcccttaaaattatacaaatacaaaataaagataagtaaaaacaaaaataaaagagaccccagagattgagcctcagcactttttctaagtgctctgtatatgttaagtcatctgcttcttacacctaccctgagagtccagtttacaattttatctccattttgcgaattaggagtagaagcaaagatacacactgactaataggtaagaatgggaattaggacatataatttctggttgtaaaatattccctttaatcattattctaaattgtccctcaatagcaaggggaagcatcaaagttagcatgtaaaataaaataaaaggaaccagtagagtcagttgaaaatgtacaggtctgtttgaccttgtagagagagaaacaaggagaaaagattaccagagatgtgcaatagtttgaaatcttataaacagtgggatttccagaacaaaaaaggcagatgctggcttacttagtgctcattcattcacagctatgaggtgtcctctgggagataggccttagattggacctatgtcttagtccattttgtgctgccataacagaatagcacaaactgggtaatcctcaaagaacggagatttatttcttatagttctgaagcctgggtagtccaagatcaaaggactggtatctggtgagggccttcttgctgcatcatcctataatggaaggtgaaagggaaaaagtccctgcaagagacagcaaaaaggtcaaattcactttcgtagcaaacccactctcatgataagaatcccactgcccagcctggccaatacggtgaaaccctgtctctactataaatacaaaaattagccaggcatggtggtgcgtgcctgtagccccagctacttgggaggctgaggcagaataatcacttgaacccagtagtcggaggtcacagtgagccgagattgtgccactgcactccagcctgggtaacagagcgagatcctgtcaaaaaaaaaaaaaaaaaaaaaaaaaaaaaaaaagaatgactaccctgttaatggcattaatcctcaaataagagcaagagaaatcacagagacttggatttgtctggtgccataacttaattgcactttgagtgtcttccctgtagaatgcgtgagcatacttgcacacagaacagtgtgcatcgaaaatttctgacaagcagagttggctgtataagactgaattatcatttgaaaatacctgccccctttcctgaagaagtattccatcttgactctgctcacataggacttgtcctgtagcttgctttggccagcaaatagagagcaggaatactacatatcacctctgcacaaaagctttataagcaagtacattgtttgacattatttattttcttctgccacggtgagtggcaaggtccaattaaaggtggctccatccagctgagtttaggataaagcactatatgggacaaagctaccctagagtcactatgaacacatgattttcataagaaataaaccctggtttattaagcctctgaggtttgggagggattatcacagagtagcatagcctatccttttgcagtaactttatactgtgtcaacttaacaatgctggaaatagacacacacacacacacacacacacacacacacacacacacatattttttgagacagggtctcactctgttacccaggcgggagtatagtagtgtgatctcagcttaatgcagcctccataccctgggctcaagaggtcctcccacctccacctcctgagtagctgagactacagccatgtggcaccgtgtctggctaatttttgtatttttgttagagatgggttttcaccatgttgcccaggctggtcttgaaatcctgaactcaagtgttctgctcatctaggcctcccacagtgctgggattacaggggtgcgccactgcaccctgctgaactatatttattagtacactttttcatacatgattctgagttagaattggacaaaagagaaacttgcatgagttgtggagacagaaggaaagtagcagctggcattgtctaatggcaagagggaggcactaggcactgttgctacctgcattagagagcttcagggtaaacatagagtagttaaaagtctgacttgcccttgtgaattctaatttgtgctcatgtgtttcagtttttcctttctgtctctcactatatacctggtgttcccaaccttaggttcataactagaattgcatagactttttcactagttatcacaattgttgagtctaatcaccataataaatccattattctatactactctatacagatttattgtctttctgattgaaccctaatttataaaccagttagagcctctttagtcgtaactaccatatgttatttgtaaaaggctttgcattcattatttataaaccttacaataattcttcaggacaggcattactatttgtaatttagagatgataaatctggaaaaagaaacattgctttccaaaggtaaaagagctagtgagctgtagagcttgcatttgaacccatgttttgatgatgttttttacctatgtcaccattctcattacaaaaaccttattcattatatatgtgatactttgccgatatacagcatttccatttggaagaagtcattttgcacatttttactgccaacttaaaaccattttttgaagtatggaatgtagaagtgagcttgtaggagcaaaactgtgcacccattttagaggccaaataatgacaggagagaatatgacccaaagaatattactttgcatgctgcagtgcacttacacacagtaatgaaggctttaatatcagcaggagagaggaaagtgacaatgaacattaaagctgaactcctgcattctctctcaatggagcatgaaataaggcatgtcatcatgtcagcgtatgctaggaaggatttgcttagaccccggtccttttagtatggtaagtcagcttcatggtgagtcagattctccaacattgtgactttttcagaccttctcatttcttcccctattcaatcttctgccttcgcagattgactgtgatactaaattgctatcttgtcaggagtatgtagaagactttcaagtttctaatatagtggtgaagtttcatgaaaggcagattattatagtgttgcaaaaatatcattttgtaagagagaaaagatattaaaccatgttaaaaatgcatcttcatctgcgctgctcttctctaaccacgccatattaaatagcattattatgttaatattcatcctaaatttgacttcatattgtggtaacaacactgattaaaaactgctaaaaatgatcatttccaaagtacctgatgtatattttatttgtagtaagattgttaccaagtcaggttaagatacttgagctttctaggcctcactagaaagtgagattatctagattatctagatctggataatttcagatctacattccaagatttacattttatgaccttatttttccagcctttgtcttagtccttgcataattatttagcccctaaaaggtcttatgctatgttaataatagagaaagtatcattttattttcattgttttaagatttcacaaatgttgtatctgaacaaattagcataaattctaagaaagcttattgcagatgaagttctattaaaaagcattcatcatcaaagaaatacaatgtttgaagttgaagtattaaaggattccatgttattcttttatattcagctgtctaaattgttatttctattccacaggtctttaaaaaacattttaaggcatattttaatattaagactttatgccaatttcagccaacttggaatgtagtctaaatataggtagaacaagtaaagacaggagaagagtataaatagggtcttagagtctaaaatgtatatggttatgttcaagagacaatgaagagatagtttctcatatacagtagacttcagaacctaatattcttcttcacaaaacatcaaaatcacatgatgttaataaggtgtcttgatgggaagaaaaatgttctatgtaagcttatgaaatgtccttattcgcatatctatctcacaggtttacaacaaacttcaataaaatttctaagggtatccgctctaaagaaatttgcctaatttgtttaattactatgatttgcatttggaaccagattatattgttgaccatataatgccattttataccaaaaaattaaatatacttggtgtcaatggattcatcactatgtataaagcttatttgtgtaataagtcaaataagtaaagaattatttgaattgtgtttgtgtaacattcttatgttaaatgcattttgtttctttaaaagttccatccttgaactgcactttgctttcttatctaatctataaataattaagttaaataacctaaatgattctcccatttaagcatagctatttgacagattttcttaaaaaacatcaaatatatattacgtttgaggcatataatcccgtaagtggtggaaatatcaagcatttactaaaattaaataccaatggcaattatttttaaacttctctaaggaccaacaaaacaaaacctaacaaaaaaatctacaaacttaattttgagcctcagttcaaggtatacattggcggtagtgagatgaacattgatttagggtatgctgtagagatggtgtttagtgttttactgctcaccaattatgacaaacgcattcttcttttctgatttctgaaaaagtacattgctagatattgaatgcctgtttttttgcctttcaaccatactggaaaatgaagtataaaagaaccagaaaagcctgtttctcttgatactgcttttaaaattttattttattttgagaattcagtgagtaccccaaatagatagaacacatcagaaatgtaataaatatgtctttgttgagaacagcttcactgactagatatttcccctttttttaaaaaaagtctattttatgctactgaatctttaaaattaataaaatacatttcttcattaagttagaacattgaacattgtcactgaactcataattctgcatgaaattaaataaaagcatggacgtatagaaacgcatttctctgaacccagctgtttacttgaaagaaagaaaatggatcatataactttcttatctagtacttacaaggattaattctcttttaaaggtatcccaatatttatatttataacagactcaaacatcctgaaatagagctattcaaacaatcatgaattcatgattacttagtacaaacaaataattgaaggataatatgtattgaaggatatatgacatttttccatacttttttcccccacagttgagtatccaatgcttaagaaatatatattttctgaaagtgacctgaatgtttgtgtttagacttgatcatttctagttttactttgatttgtttgttggagttcaaatatgcactattctagatttacagtaagtagatctttcctttttaatgaaatgaaaaataattcccgttcatattactatttgtttttagatatggtcaaaactctttgacacttttaaaatattgccttaaaataaaagaaagagacttaaaagctgtgtttcaaagtatccaaacttcagatagtagcttactaaattttgtttcaccataagagttataattgaatagctaatgtgattttttataaccagattgcagatatacagcattggagtgataagggccagatgctatctgaacagcaggtcttcagtgagaaaaattagctcagcttctgtggtctttgtttttcagtcagaacacattcacatcacagctgggattcatactggtctgcttgtttctggtagtcttcctgccctttctactttaaagagagaaacatattgaccagaaaccaacatgcttacaggggtttgacctttaaaagagaatgaaaccttgtaagcactggataagaaagttatatgatccgttttcgttctttcaagtaaacagctgggttcagagaaatgtatttctatacgtcaagcagcacttaggactcattttggacctcaaaagtaaatcataacattttgatatgttgaaggaccttggacaattacctaaaacttaaaataaattactaactcttttattaggaaaaatacttaacaatctttggattcgccgtttaagacaaactttctcctctacttttcaatttaagaatataaagacttgattgcagtaacaaagttaggaaaatgtgaatacatattatacctccaagtatgaaaactcaagtgaaatcagtgaacaaaatagtttggtccatgcttttacttaatttcgtacagaattatgagttcagtgacaatgttcaatgttctaacttaatgaagaaatgtattttattaattttaaagattcagtagcataaaatagactttttaaaaactaaagaggaaattacttatctagtcagtgaagctgttctatatgatcattggatatatttgctatatagactcaaattaaatttctttggaaatatttgaatatagtcttcccatatcagaacataaaagtgctaaattcattctaataactgtgtattattatgtaaagagattattgtaaatccttttttcacttacagtaaatgtctggaaatgtctgtcttcttttctgtttcagtgcttattatcatcttcaaataccagtaactttcaacgaaggacatatatcccctccgtgttgaagcatgattcccaatgttggaagacattcttgggattttaacacaaaactgtattttaaacccatacctaagtggaatctacttttgcctttgtcctgttgtgctacaatttgttacttccaattccttcctctacaacagctagaatgacattttaatgagggtgattttgatcacatcacatttttgttactatcttctatttttttttttaaatatccaaaatctgtaagcggctctactatgtcccgaagaaaactatctttgcacaccatcctcctttactcccagaataacaatcatgccagaatgtcattttttttccttaaaatttttcatagtcccatttggcttatggctttttcacatgatttttttcctccctgaaactctgttaaaaaaacattttatttgcccaagagctacttgatttccctcagtttaaatgctatttcctccaaaaaggctttgatcctcacttcagtgactatatgaaagcatgaatatttcttcaaaaccatttcagttttcttgtatttggggcacatggtgagattatagtattctgtcttaaagagtataggcatcatcatgaagcttactgagattttagacttttacttcttacctggaattattatttaattttattcagtttcacaagcaaagatttgatcaccactagattcacctccctaataagttttactatcatattatggcacaataatttttattatggcatgataatttttacttattgggtaattgcttgtgatatttgcagaatgctgatgtccaaaatcatcatgttttgcagagtccaataaaatatggtagattgggtataagaggacacaaaattgtacagattctgaaagttgggtatctgtccaatgaaacggagttactaccggatagaatctagcttcctagtataccagcctctctaccaacaactggtcaaaaatatacaaatgtttagaggcttacatttgaattaatcactagcattagaaaaccgatgattgcctgtaataataaattaacctgtaaaagcatctctaaggaaagcgtagtcagtgaagagagtaagagaaataaataagcatctatgtctactgagatagctaattattatacttatgggagaaagacattaaagcagctggcctataatctattagcatccttgaaattagcatccctgaaattactggtaaagatctctgtttagtgtaattttgatttactgatctgattcattgtgtcagctgagctctcatgaaggaataaaaggtttataaaatgagaaaaagattttaatggtaatttacaccatgatgacttaaaataatgaaaaatttggaggataaaattgttaaaatctctaagaaaatagaaaaacataaaaataagagataacaagtaaaattagaggattaatacaagaagtgtaaaaccttcctggagatactttctgtacttctacttccagtagaagtagataaggagaaacaacagacaaaagagaaggaattatcaaagaaatactgtattaaaatttcagaacagaacacatgtatcatcaaattaaaaggagccctgattttttttatttttttattacgagcacaaaattttactatttatttattattagcacattttttaagtctgtatgttatcctgtttttttttaagtttctcatcacagagaaagatagtatgctactgctgaaatacatcagtagtgacctcaaaccatctctccaggcacataaaacaaaaaattgaaggcagtactcaaacttgtgctacctagaagcatcatggatttttgtctgctgctgtatattcaattttgattagataggcattagcatataacattcatagcatcaaaaaattcatgaaaatgagttaaaatgtcagccacacaactatctaaatgttagaactataacatctagcatggttatcttggaatgtcagcatgaattttttactctaaaaagtactccaaaaaactttcacaatgttaaattcaacatttaatgtaaaagatttatgtgtgcagcaatgcattggaatcatcctgtcgaaagggctctctttcaacccttctgaaggtgagaaagtgaatggggctcacttttggctacagctggtgctgcgctcagctctctgatattattttgctctgtggtcaaaaagcagaagcatgaagcatgcccaagccagcaaactgaagtgcagtatgaactgtttaaatttctctcttcagatatgtctattcaaccaccacttggatgtctaggctatcagatacttttccgcggctgcctgtttggttttgttgtaaacatttagtagttcctggtaggtatggtagtttctgttgagcacacttgctttgttgagtcctggagaggatactgatagttcagtttgtcctgatatgttgtttttagtgatccacacatgtttacggatgtctcaggcagttgtcagagttctactttatgcagcaatataatcctaaagacagagagccatctatctaacaagttataagatcttctgaagttttagatttcagtttgtcctaaaatgatttaaaaaattagttcatggctcattctacatctctgcatcctgacctgctagattggaaatgatagccttgttggaaattattaaaaagaaaaaagtgacacaatcatttgcctctccagtgggaagcatgaaatcttcatatttttcatgtccttttaattttgccccaaatcaccttagacattgtgatatttatatctaatagaaaattccaatactgatgccaatctgagctaacacataggattataatgccctatcagacttatgcaaatcagagatctgttccagtctgaattaagcttcactaaatatcaaagaagtaggcaattaagaagctgaggaaaagcaaagagatgtgtagatattgaaaaaaaatctctacatcttgcttctcatgttgggcatatccctctggtgcagaataattaaggtgtctaatgaagtctgcagaattccatgcaccctcaggtatgttgaaactatgaaacctttctatgtgtcagccaagagacttgtatagcttaggatacattttccagggggccacagctcacagatccttggatctatttattatatgtattctaaattgggaccattcttccaaggggttttgtggaagagccatgtatgcaaagagatctccaacacagaaggaaccaagaaaccaaaagcaaggcagacaaatccagtttgttggtaaaaagcaatttatttgggaaattgtgaacagaagtgtggtcttggagagcaaggccagtagatatctgcaccattacttcccagacccagggcttttttccactgggaaaaggtatacgtgatctatagacataattgaaggcaacttcctgaacaggcaagaatgctatgtgcatcatggtctacaatttgtgtgataacatcaagattgctctgacctgaggacaggattttatagttagtacatgtttagactaaggacagtaaacaaagttggaagcagagggcattcccagggctgatgttattcagaagtcaacatggtggattatcatccaagatggagtcactttagccaccacataaggactttgcagaaataagtttaaaatgtcttctgaagtgatactgtgttcccatactactagcaggaatttttctgtaccaatatggtaataattccaagatatgtgaactaaatataagtacaaagagaattactagtgaagtctcaaaaggaatattctggctggttttgtagtctagggagcaacctatagaaatatatatttttacttgccctctaagtcaatatgtttattaaaaatggtgtaatataaaaaagttataatccttcctttgaaatgtctcaaatttattcagtcaaactctatgttaagtgcagataaatctgtgatcaggtattcacttgtttgcctgtcagattcttcttcactatcttgtttttatgttctatgtcttacataagaaaaagaggaatgataagtcatactaggaagcagtggcttttcctagtgtttatacaaattgctcaagattctggtttcagatgctctatcaagttcaccatggggaacctgataagatggttatgtcaatgagagcagcctttggcctcttctaatgagattcattccatctcccagagcaaattgacatgaatattttcaaatgcttatatgttatttcctgttgtagaattgcctataggagctggtatttataggaacaaaggatttttttaagtgatttaatttttcattggaagttgtctgctcccattaccagtaagagacagaaccatctcttaggtctcagggaggactgcaaaataaagcagtaatttttaaaaacaagttacataactgttttcatacctttcaaagtatgaaagcaaagttcaaaggaatttaaagcaggtaagaaaatcacaacatataaattttcctgaatctttatttttcaccgtaatggctatgagaaccacacagaaatgaacaaaagacatggagcatgtttagatatttaatgaaacaagaataggaaaaccctggagattacttgcttctgaatcattgccttaagcaacataaagttacagaaaattaaaaaaaaatctttaagcaacataaagttacagaaaataaaaaaaaatctttaagcaacataaagttacagaaaataaaaaaaaaatctaaccaccaattgtcctctttagttatcttctctctgttaattaaggtctctaatgaagtctcataaacaaatcaagttggccttcttagacagttcctataaggcgatccccaactctaacctcatgtctggattctggaaagcaacacctatcacatgaatactaatgtaatactggtgcatccgttcagtggtattcttaaacttcatactattatattgtgctaagccccaagaactttcatatacatatcctacagagtagccagttccttcaccagcaacaatcaacaaaataaaacacttccctttaatcatcaaaaagatgtaatatctcagcaacaaaagagtgcatgcagcgcctttatataagaccacaagttgaagattcacaaaaagcattagcatctttacataaaaaccatctctgtcttagtttgtgttctacacaaacagtccctaagacaagagtttaagagcaattaaatttttgggaggtaatcttaggaaacattgctacagtaagaccaattgagaagggaaaaataaggaagacaataaataatatattgtcaaggaagttacccactctgggcaactgaaggttaatcctattgggaaaacttgagagatattgtagaacacaggagtcagagattttttttttttgccttggggacacatttgctatttatttaccgccttccatggaccttctttgagggctgctgttgagaggtgctaattgtgtaacatattcagcttgccctatacacaggcatggcaggctctggtgcctgaagtaataactcagtgagaatttaaagtagggctgagatgatccgaaatggtaagaattgaggagtatcaggttggcacaacagcgtcttctaaatcacctcttgggaatctaagatttaaagcgtgtatggcctagcgtaagatttataatgttaatatatgcttgttttctttggaccaaactggcacatgaggatagagaatttatttataactgaatacaaaattgacatccatcccgccaccgccaaaagaggaggaagatgtggcagctcaaaaacattatgtgtctgagacagacaggaggtggccaagttgatttgctgacagaaattttaataccctttgttatattgaactctgtttcagtatgctagcttagatcatcatatttcccctttcccgaatctatttcatctgccataaaatctccctcaatggctttaaccaagaggaatttagatgactgtaatcagccctaattttcaaatataatgctaggccacttgttggccaagaatgaatttgtccaaaataaacattgctgtaaacatcataagtccagttttagcagtactgtcaaacagcttaccactgtggaggtacaggatgcgctattgccaacattgcatgcaaaattttagggccctacttcatcagtagcttataccattttaagtcttaagttttaaatattctgcagataagttgcaacatcttactttggttttaatttatatttctcagcttaataaggagtttgaaccctttttatatgtctgagtgtttgtattaatcttttaataaagtgtctatctaaatttcttgttcatattttttaattgggttttctgccacaattattattaattgacaataatttatttatacaaatataattaaatgtattagaagtgatcacttccattccttagattacagtttctctcaattatgccatttttaaattacaaatccttatttctttattttaataccgtttagttatttttatcatttattttatggtcagtacatctggatcctgtttaagaaatagttcccaaccaataacagaaagctaacgtcctacaaaattatttagaaactatgatgttttacctttatattatttgtctaggattgattttgtgtattgcataaggtggcagaggtcgctggtgcctgtttccaaacttgctgcatcactgtcatcctaggactgatattgatggctgatgtttatcctttcatcaatctcaggttttctttcttagcttaagcccttagtagatagctttaagcctcttcccaagaaataattcatgggaaataaatttaatgaactgctgcctggattaagtacctagatttattttttaaaaacctgtccctttagaatattaaagttattaatctatgtcttctagaaagtgatttagatattggaaaaaataattccattgaattttgtttctgtttggttgatatgattttaaccctttctagaaatatacttatattccaaaattttactattatgagctttatatttgtttgttttttttttttttttttgctggatcttttttttttaagtttttttttcttttattattatactttaagttttagggtacatgtgcacattgtgcaggttagttacatatgtatacatgtgccatgctggtgcgctgcacccactaactcatcgtctagcattaggtatatctcccaatgctatccctcccccctgcccccaccccacaacagtccccagagtgtggtgttccctaattttccaggaagcttggaatgatttgaaaattctgccctttagctctaaggattttatttatttatatagtttataatttattgttatttattttctctttcagtgatctataattgaataacaaatttccatttttttctgaatttggggaattaagagttcattcttctgataaagcaaaataaattacaatatactcatttttcttttaagattcagacgatgcaaataaaagttagatgaaatttacagcaaaataaaatagaaaaaattaacgtgtttatactgttgttcaactgttcagatttctagtttcgtactatgtattctttattatcaacatactagaatatgatgtaattcaagaacatttcatacataatcactttgataaaaaaggagattggcaagagcataaaaatatttaaaacactagattaatgaatccaaagctacataaagatcttataataacagtagtaaacattttgagaaatgtgtagaaactcctaactgcagggttttataaccaatatgttataactaatataaaagcaatatgttgctaatagacagccatacttcacactaagttctctaatgggataacttgcaggattcataatttaacaacagattgaaaaaggaaaatttttagattcagtagcaaacattttggatttctcaacaacactttctccctaaattgctgtgaaatacattattcatcaatacctagatccagaaatattcactgagggcctgtagtggcaggtagtgaattcattgaggcaacccatgcaaagtgcacccgcagagcctgtgatgtgagggggatttaaacataagttgccctcactctacttcttaaaaatattttcaaatgattcattaacattcttattttatatgatccttgaattagttagatgtatattcctcaatctccaagtattttgaaatttttctatcattttgctattaatttttagttaaagtcctcatgtttgagaacttattttgtatgattactgttattttaatttcacacatgtatgtccaatggccaagaatgttctctatcttgcagagcattccctgtgaggttgagaagatgtatattttgctattggaacgataattctataaatgtcagttggatcaagttactgaaataggggctgaaatctctatctataataataaatgtgtatgtttctccttgcggttatcagtttttgtcacatattttgacacttgatttttaagtgaatgcttcaaggtttgctaatgtctttttggagaattaaaccttttatcattatcattaggtaatgtccctctttatctgtaataattttccttctgctctgttttgtctgaaatgaataaagctgctccagctttcttttgattagtgatagcatccatgtctttctttatctcctttacttttagcctatctatgtctttatagttaaaattggtttcttgtagggaacagatagagtttttccccctgcactcaaaatttgtctgttaactgatatatttagatcattcacatttaaagtgactattaatatatttcaatcagtatcgattatgtttgtagcttttaaaattttcttgaacattatttgtttcttttttatctcttctctttttatatcttctctggttttcattgaagtttgaatgatttcattttacttcctctcttaacctatcaattatactttttaaaaaatggttattttagagtttaccacatacatttataatgaatttaagttcatttttaaataacactatgcctccttactggtttttcaggtaacttatagagtatttccacttcccttctcctatcccttgaaaaattgtcatttatttctcttatccatatggcataatcaaagaataaattggtgatatttgttcaaaaatccatgcctattagattcatttagaatataaaaaaattttattttattttcacttatttcttctccactgatttttctatttttatgtagagatgagtttctgacatatatttcttcttcctgaagaaaatattttaacatttcctgcatgggtggtctctggtcataaattcccttagtttttgtttgagcaagtatttatctgttgatgacttttcaaggatagttttgtgggatacagaattctagatcagcgttttttttttttttccctttctactcttgatatagttcatcccacactcttcttgctgacaggacttctgccaaggacaactttcctgtaatgtttatctttccttattcctccataggtaaggttgtttttttgtttttgtttttttctcagaatttccttttttttttctttttctttctgcagtttgactttgccatgcataggtgtcattttttgttatttatcctatgtcctgtttttacattttttttaattataaaaagggagggtgcttattggcttcctggatctatggtttcttaattgtcaccaattttataatgttctccaccactcttgcttcaaatattttttcttttctttttctcctcttggcattccaattgtgcatatgttacaacttttgaatttgcccagaagttcttggatattacgtttttctctttttttctataaatttctgcttgaaaagtttctactgatttatcttctgaatcaccagttctttcctcagtcagtttattgatgtgtacatccaaaccattcttaattttcgttagtgttttttaattttacgaatttctattgatactttcatagagtttttatttgtctgcttttattacacatatgttattgcatgttgtctacttttttcattagagctctcagcatattaatcatagttattttaaagccactgtaaaacttctgatatctgcttgtgatctggctttgaaacttgtttcttctttccagactgttttcctgccttcacatgacttaccatttgttttgttgttattgttgaaagcctagcatgctatatcaagttatagaaaatgaggtagataggccgttagtgtgtttaatcaagtttagcctaaaactgcctccttacatattttaagttccacctaaagtcttctctatacgttgtgaactgtaaaaagtggaggtgtaaacagaccatagcttacacttgtgccagtcaccaagttatggtcaatcaaatgtagccaactcttcaaataagtcaaactcccagctgtaaccaatccatctatttctgtatcttacttccttttttctgtacctcactttcctttttctgtccataaatcacgtggctgtgccggagtctcaaagagcctagtctcgttcaggaggttgcctgattcacatatctttcattgttcagttaaactgttttaaattaaatttggcagaagtttctcttttatcaagtgtgaagttttatgtaaatctttctaggacttgaactgtatttaattttcgctgtagccatgggtgccaaggccttcaaattcctctagtattcttacttgtctctcttctttgttttttgtttctttaaaaattccttttttaatagagcctgaagctctgtcattgtgaaaataaggaacagggtaggagaggcattttataatcttatacaatctcagtcttttggtggttctgcatccctgggttgtgtcctttacaagcatctcttacctctctcccctccttcaactttaggtgagataagaaagcacgagagtgctggaactagataattgcttttctgcctatggaagataaatcaccggcaagttcattttcagtggaaaataatccatttttctggggtatgcatagttgtatttcaaagtggtcacttttgtcctctccctggccaaagacatgagctgagttttcttggatctccaccatgagaacctggtagcccataaagttgtagggggtctctctaagattacagtccccagaagttttttattctcaagctagtctacactgagcctccaacaatttattgactactgttgaaatgtcccagtttatagttctatcagggcctcttctaagtaacctgatctgaggtttgtttctttgtattcagtttgtttttttcagatccaaagcaacgcaatactctgatgcatgcaagaaaactcactgatttttcaattgctcatcttttttttttttttttaagatgggaatgataactttcaaacccttttcttgttagaggtgaaactatataccctggtttttcacaaattcagattattggccttggagcaaaaaacaaacaaacaaacaaacaacaaatcagaacctcatggaagttgatatggaatgcacataggagcccccttaatacacatttacaacctcttaagacacagatgttatgaaatctaattttctttagtttctgtacagaagaacttcatatttctctaaagcagtaataggttttctcataaatcttgcaaattcactccaaacacatatacaagtagaaaaggcataacaatgaaatggccttggatatagaaccaatattctatgaatatctaacagatgtatgaaacattacaggcattcagtatgcacaaggatttcattactgccctggggtctgcaacattattttgctgaaaataaccttaaacagctaagcaatgacagcctttcttcttattacctggcatcctcactttaagtggtaacttcaacagttcatctaggctctgccttctttccaccgtcattaatgatttgcagtgagtcagttttcatggattacccacattgcattttgatactgatgactaattctctagcggttttctatacttagatgaaatggagaaatctttccttttttcacatatgaagaaccacttcaagttactaatatgaaggtaaccaaacagggcttctcctttaaactatgctaatttttctgtcttcttgttttgtgatacttgtgtcatttagtgatcaggtgtgatctcatactctatgaatcatgctatcaaccaaaatgactctattttaatgaactgagccacaattaaaacaaacaaacaggctatttcataccaaaatgctgatttaacaattcttttaaacttggaaaattggcaaccttatgtatgtatctctacatggaaataattaactagtttgggatatatgtaattatttttggatatttattaccatttttaccattccttttattgcatatgctgagtgtgtgtgtatgtatgtgcatatatgtagctcattgaaaactaaagcaataggctctttcattaaatactacgtatttcattgcatgctattttttcaaatatgcaagtaaaattgagaaaacattataaatgatccaaaatacataattttggtatatattaaagcaatttttagtgctcatcacaaaaataaatgactttactttgccaaataaattattgtctagataaaatgtctaggccatactatacaaaataaacttgcaaatccttccctcactatttcaggcatttttcctttttattttttttcattctgtgactctagtcaatgacatttttttctttttaagtaagaaaaaaattatattacattatattaacatatatttatctagcttaaaagagcagatatttcaattttatgtctctgggataggaaaaatcattccttgaatgaagctaactgagaaaaaaagtgttttccatctaaagggtaattttattctccctcatattcagtttttaaattttcaatattatttcaaaattgcccttttcaaacaatttaaatttgtgaactttccactgagagctggttgttatcatgaattcatacaaatagtcactggcaaagagtaattatcacactatgatgctgttaaaattgtgttgactcatctgaaaatagttggagttgagtgacagactctcatggctgattttcaaatataattataatcattcattcattttttgtttactcattttagtaactgttgccacatatcagaatattccaatactaagtagcttaaaacaaccttcatttagtcatcaattccaaggtcaataatcagtacaatgaaaatgactagtccctgctctacagtggctgggaatttagttgaggagacttaaagcctgcataagcttggctgcttggagctagaattatctgaagggacatttgctcacatgtattgtgggtattgcttacccttagcctcagtctcagccagacttgaggtttgaacccttacatgtgatctctccacatgacctgaacttgctgtcatcactgtggccctagggccattggattcctatgtgacaattcaggactccagtgttagtgttctagtcacaaggtagaaactgatcacttttatgatccaggcttgaaagtggctgattgccacttcggccactcattcttttgattaagagcaagccacaaatacaatttaagggaaatggaagtagctatgtctgttaatagggttgtggcaatgttctaaaaagttctaagtcgtcttactgaatgggaagtattgaagtgatctttagaaaatatgacctgccaacaattgcttaaagcaaaactgaattagactcttctcaagtgtgagtgtgtgtgtgtgtgtgtgtgtgtgtaatcccttgtcatctttgttacacagagattttaacgtttgaaaatcctttgcattttagctatttcctatctttcatgtttttctatataatcctgttgcctttggttctaaaatcctatagtgcttatttctctaagggtatttaactgcaggatttccaaatgagagtaattgatctgtgaatacactgctatttcaaacacaaagaacttgaatgaaagtgttgagatttagaaatatgaggattccagtggcatttgatatttcttatcagaagtaatagaaatgtacactttattccactgaacatatattttaagatgtaaacctatgctttaggacaaatacttaaaagccaagtcaatgattacaaagacttcatgaagaagatattatatattattaataattgaaatctatttaataattgctagtacctgctatcaaatatgtatttagttttataccaaagactacattgggttcaagttctaacaagcaattatgatcgtaattatgactttattcataatctcatattcatgagaaaaatttaaggattcaaaattagataatatgcaagagtgtatactttgattaaaatttgcttttcattttttgaataatcattaacatagcccttgaaaataatggaataaaaatagggtatagttttgctatatgccaatattatactaggggatggtacagaattgtgaaaaaaataagcattatatttgttctgtgaagtcagatctttacttttttaacatttgcaagttttccaataccatttaatttattattgctttcttagccgttttgctttcggcctccaaaatatctgtccttgtttgacttaatattcatacttttgtctacataactataattctttctcataactcatatttttattctgcttcttatttagataaataatctcaaaatagactttagcacaaatgattttatttaataattatatatttatagcagtacataaatacatactactcaaaaaattaggaaaaagtaaaatataaatgttatttcaggatattatccatgaaaacttcccaaccttgtgagaaaggccaaaagtcaaactgaggaaatgcaaagaacgcctgcaagagtctgcacaagaatattatcccaaagacatataataatcagatttttcaagattgaaatgaaaaaaagaatgttaaaggcagctagacagaaagggcaggtcacctacgaagggaaccccattagtctaacagtggacccctcagctgaacccctacatctcagaagagattggggacctagattaaatattcttaaagaaaaatattttcaaccaagaatttcaaatccagccaaagtaagttttttaagccaggagaaataagatccttttcagataagcaaatgctcaggaagtttctaccaccagaactgttttataagagttcttgacaggagaactaagtatagaaaggaaagactgctcgtggctaactcaaaaacagacttaactacacagaccagtgacactataaagcaaccacataaacaaggcaccataattaccagctaataacacaatgacacatatcaatactaaccttgaatgtaaataggctaaatgaccccacataaaaggcacagagtggcaagctggataaaaaagcaagatccaatggtaagctgtcttcaagaaatccatctcaaatgtaatgacatccattggctcaaaataaagggatggagaaaaatccaccaagcaaatggaaaacagaaaaaaaaagcaggggttgcaatcctaatttcaaacaaaacagagtttaaaccaacaaaaataaaaaagacaaaggaggacattacatatggtaaaggattcaattcaacaaaatgacctaactatcttaaatatacaggcacccaacacaggaacacccagtttcataaaggaagttcttagagacctacaagagacatagattctcacactataacagtgggagatattcaggatctaaactcaacattggaccaaatggttctgatcgacatctacagatccctccacccaaaacaacagaatatacattcttctaattgccacatgacacatactctaaaatcattcacataactggacataaaacaaatctcagcaaatgctaaataactgaaatcataccaaacacactcttgtatcacagcttgataaaaatagaagtccagttatattgtttggctgtgtccccacccagatctcatcttgaattgtaatagccataatccccacatgtctagggagaaccctggtgagtggtgattggatcatagggagtggtttcccccatgctgttctcatgacagtgagtgagttcccatgagatctgatggttttataagggactcttctcccttccctctttcctctctctcacctaccatcatgtaagacatgctccttccccttccaccatgattgtaagtttcctgaggcctcttcagccatgtggaactatgagtcaattaaacctctttcctttataaattacccattctccggaatttataatgaacatcaagaataagtaaattgctcaaaactatgcaattacatggaaattaagcaacatgctcctgaataacttttgggtaaacaatgaaatcaaggcagaaatcaagaagttatctgaaactaaggagaacaaggatataacataccagaatctctcgacacagctaaggcagtgttaagaaggaaatggttagcagtaaatgcccacaccaaaaagttagagaggtctcaaattaactacctaacatcacagtgaaagaattagagaagcaggaacaaatcaactctaaagctatcagaagacaagaaataaccaaaatcagagctgaactgaaggaaatcaaaacacatacacacacacacacacacacacacacacacacacacacacacacagaaattcaaaagatcaacaaatccaggagttttactttttgttttgaaacaaataataagatttataggccattagctagaataatagagaagaaaagagaaaatatgcaaataaacacaattagaaatgttgaagggaatgtttccactgaaataaaaacagccatcagacactactacaaaaacctctatgcatacaaattagaaaaccaagacgagatggataaattcctggacccgtacacccttccaagaatgaaccagtaagaaactgattctctcaaaagaccgagattgggcttcaaaatggaatcagtaatgaatagcctaccaatcaaaaaagggcctaggatctaaaggattcaaagctgaattctaccagatgacaaagaagagctgataccataactactgaaactattccaaaaaattgaggaggagagactcttccataactcgttatatgaggccaacatcatcctgataccaaaactttgcagagatgcacacaataaagaaacctttaggccaatatccttgatgaacatagatgcaaaaatcctcaatgaaatacttgataaccaaatccagcaggatatgaaaaagcctatgcaccatgattaagtaggctttatccctgggatgcaagttcgattcaacatatgcagatcaataaatgtgattcatcacataaatggaagtaaagacaaaaaccacatgattatttcaatagatgcagaaaaggcttttgataaaattcgacacagcttcatattaaaaactttcaataaactagctattaaagaaatacacttcaaaataataggagccatctatgatgaacccacagtcaatatcatactaaaagggcaaaatctggaatcattccctttgaaaactcgcacaagacaaggatgccctctctcaccactcctatccaacatagtattggaagtcctggccagagcaatcaggcaagagaaagaaataaagggcatccaaataggaagtgaggaagttaaactatccctgtttgaagatcacatgatcttatattaagaaaaccccataatctcagcccaaaagctccttcagctgaaaaagaacttcaacaaagtttcaggatacaaaatcaatgtacaaaaattactgtcattcctatacacaaacaacagccaagccaagagccaaatcagaaggcgatctcgttcacaattgccaaaaaatgaataaaatacctaggaatacagctaatcatgtaggggaaaagtctctacaatgggaattatagaaattatagaaaactgctcaaagaaatcagagaagacacaaacaaattgaaaaaccttccatgctcatggataggaagaaacaatattgtgaaaatagccaatttcccaaagcaatgtatagattcaatactattcccattaaactaccattgacatccttcacacaactagaaaaaaactattttaaaaatcatatggaaccaaaaaagagtctgaatagccaagacaattctaagcaaaaaggacaaagctagaggcatcatgttacgcaactttaaactatgctacagggctacagtaaccaaaacaacatagtactggtacaaaaacaggtacatagaccaatggaacagaatgcagagaccaaaagaaggctgcacatgtacaaccatctgatcttcggcaaagctgacaaaaacaaacaatgaggaaaatattatctattcaataaatggtgctgggataactggctagccatatacagaaaattgaatctggaccccttccttacatcttgtacaaaaattatctcaagatggattaaagatttaaatgtgaaacccaaacaaaaaccctggaagacaacctaggcaatgctattaaggactcagaagcaggctaagatttcatgacaaaaattaaaaaaccaagtgcaacaaaagcaaaaagtgacaactgaggtctaatgaaactaaagagcttctgcacagcaaagctaaacttagtgaaaacctacggaagggagaaaaattttgcctttgtgcatctgaaaaaggtctaatatccagcatctataaggagcttaaacaaatccacaagaagaaacaaacaaaccaattaaaaactcgaaaatgggcatgaatagacacttttcagaagaacacatacatgcagccaacaatcacatgaaaaaaagctcaccagacgtacagatcaaaaccacaatgagataccatctcacaccagtcagaatggctattaataaaaagacaaaaagtgacagatgctggtgaagttgtggagagaagagaacactggtacaatgtcagtgggagtgtaaatgagctcaaccattgtgaaaagcagtatggcaattcctcaaagagctaaaagccgaactaccatttgacccagcaatcccattactgggcatatacccagaggaatacaaatttttctaccatagagacacatgcacgcatatgttcattgcagcaatattcatattaggaaaggcatgaaatcaacctagatgtccatcaatgagagattaaaagaagaaaatgtggacatggaatactgtgaagtcataagaaagaatgagatcatgtcttttgcagaaatgtagatggagatggaggctattatccttagcaaactaatgcaggaacagaaaaccaaatactgcatgttcttacttataactgcgagctaaatgatgagaactcatgaccacaacacaggaataaatagacagtggggtctacctgaggattgaaggtgggaggaggtttaggagcagaaaaggtaactgttgcgtactgagcttaatatctgggtgatgaaataatgtgtacaacaaacccccatgacatgagtttacctaccaaacaaaccttctcatgtatccctgaaccaaaaataaacttttttaaaaaaataaaatatcaaagttacccttaagaaagttccagaaatgcaacattattagcatccctgatttctattcctcttctttcctgacaatcgtatcaactccatgatacacatagccattaacaccaaaggacagttttatttccttttaaaagtagtgtaattaggctgatacaacatgtattcttttgtatccagcttcttttgatcaatgttttatgatataagattcatccatatttttggtgttcattttaattgttttgttccactgtttaatatatcagatacaagcacacacaccatacacacacacacacactcatacacaactatgtacacataatctactttatgcttgatagatgcatgcctttcattgtgtatagagatggttagacaggaaaagagggaaggagagaggaagggagaagagaagagagaaaaggagaaggggagagaaaataaatttgttgggttataggatatgcataagctcaattttaatatgtaataaacattgaaatgtttccaaattggttctaaaattatgtgtgctcagaatagtagatacattttctagttgcactgcatccttgagaaaatttagccttgccaataattttatttgagtcatttggtgagtatgtaatgttatctctcttcttttaacttatattttcttgattattaaagatatttagaacatttttgatgtttatctgtcgtccatttggatattatattatgtgaagtgctattcaaggctattacctgcttttttattgtgtggtattttttaactatattaaagaacgtgttatgtattctgggtatagtttcttttttctcattttatgtgccacaaacatattctcattctctgttttttttttcttttcacttattttatgtttaacgttggtctttattttaacagcaaatttatcaccatttacttttgttactagagcttctttccctaccataagactatgaaagtatgtttttatattatggtctagaaattttactggtttacctttcatcttactttttacaaaatgtatgaattaatgttttcttatggtgtgagagaggggtcaatatatatcttttcccatttgaataactggattaccaaacttaatatatttagaatacttcttttctcttttttgcatcttcatttttgttatgtcaggtgccctatgtgcaagtgtgtttttgagaatccttttctgagccattattctagttttcatcattgtggaaatatcatacagtttcaattgatttaggcttctcatacattttgttcatatgactatcttctcttgtgaagtgtctactaaatttgtcatgttttatattaaacggttttaaagtttcttactgatttgttgtgctacattatataatcagaataggagtctgttgaatacatgaagtacagataccttctacctctttacattccttttctctttcatcatattatgttgatgaaaagcaattcttcattgaatgtattcaagtttataaatgtttcacacctagtcaatggttttcttcctgtttcctatctctagcctgaaggtaaactcctatattttagtctaaagtctttactgtttgtcttttttatttagatctcctatccatctgaaaatatatgttttaaaatatatttaaaatatattgtgaagcagagttcaatatttaatttttttatatgtacacatcattgacctatgaccactaattaaaaagaatatcctttcctcacacttacgggtcacacatatcaggtatatgtttatttcttagtgtatttatctatccttgtgcatataatctttgtatcaaatactatatatttctgataattattaattttggtaacatcagttcttcagcttttaatatttcacttcatttattgaatagttaaggaaatattcatattttctattgcttttcatgtcaatttagtattttcaatgtattggtgcaaaggtgtttataatatcttgtgttttaacatctatatactctcaaattatgtcctttttaatttttagtcatggtaatttgtggtcctccctttcttcttggtgaagcttataagttcattgatgttttgaattgttttgggtgcctcttgtggctcatctcacatcctattgtccttacctctatttctagatgcagctatgacattcagtcttcaactcactttgtgctgatggtgtccaactcaagcccacacatgatacttttccttattctcccagaagtctctacactgctgaagtatggggttaaaatagaagattgttgacagatagcatactgggtatgtactgcccctagggaactcttcagtatagataaatggaagcctataattaaatacttattttcaatcttctagtcaacaattttcagaagcattgataagcacaaataaaatatattggtgatcaacttaatagtacacccttaacattaatattcctacttgccttttataatttttgatccctcatccctgctccctgggataacctccccaatacaccatctttcaagtttattttcagaggaatacagattaggatattagttttttcaaataatcaactttcaaacttcatacatttaatcttctgtatttttaaatttttccataaatttttataactatattagtagcttcctaaattttttttcctatcaagttagctgtttttatttcatttttttagataaatgcttaggtcactgattgtcaacttttattcttttctaatacatgaatttagagctgcaatgttcctagcaaattttaattaaactgcatggtacaagttgtgctttgcgttattttctcattatttaaatacaaacattttatagtgtccattcagatattttctttgaccttagagaaatttagaagtatgctatttaacttcaaaataatttttattttctagttattatttggttatttattttatcttaattctactatagtcagacaccatacattgtattatttgagtcatataaaatatgtttttatttaccttattacctctcattcatttcttgatgtaatatttcctttgcaattaaataagtgtgcattttgccagttgtctgctttgttatatgcatgtcaattagtagcattttgtcaggcatactgtttcaagtattctgtaacattaccaattgtctgacttttccttcagttacagaggtaattttttcagtctataagatcatagatttgtccatttcttattttaattctattagcttttgatgatctattttaatacctttgttgaggtaccattcacatacaattaactgcccatattaacagtgtaaatttaggttgcttctgacaaaggtacatgcccatgaattcatcactacaatcaagataaagaacatatctatcaactcgaaagattcctattgcttctttgtaatccatttttttcatcccattttttcaaattttatatcattctcaggcacatggtgatatattttctgtcaaaataaatcaatttcaattccctatatagatgaccccacacttataatgagagtacatctcaatcaacccatggtgagttgaaaatatcataagtcaaaaatgcatttaataaatctaacctactaaacatcatggcttagtctaatctacagtaaacatgttccgaacacttacattagccaagagctgggaaaaattatctggcaacacagtatactgtagagtatcagttgtttaccctcaacattgtgaagctaactgggagctgcttcttgctgccactgccaagcatcagagaagtgtcatatagtatattgccagcccaggagaaaatcaaaattcaaaatttgaagtatagtctctactgaaggcatatcactttctcaccattgtagagtcaaaaaattggaggtcaaaatcatattgtaagttggggatggtctgtaattttacataaatgaaaacatacaccatttaagttttttttctgacttcattgacttagtatgtttattttaagacgtatccatgtgaacagatagataattcctttttattgctaagtagtattccatggcatgaacattccacaatttgtttatccattcacctgttgaaggccattacaaatagatccactgcaaatctttgtgcagaggttttggtcttctcgtatgctcttatttctcttagataaatactaaggagatgaatggatagatcatattgtaggtgtaggtttaattttttaagaaattgttgaccgtttgagaaagtggttgtagcattttacaatccccatcaatggtgtatgagagttatagtacgtccacatcctcaccttacagcaaatgtgcatttaatgttagattatgcttgcttagaagaaaaatgtgctggtgttcaaatgtatctattctatttcttatctggctttggaattctctgtgccttaaatatctgcccttgctttgtctgtctactaattcctacttatctctcaagatcaatctctgatctaccccagaatgtgttttgctccctaccttgtacaacgactttgtccttcaagttctgaagtccctatgccatagtaacattcttatagtttaggcaaccttatttgattaagggtttcttgcaggaagaatcatatattatttatcctttaacctgcctcagagcttgacacatactaagagctccatatattttgtgttattaaatgaaatagtaaacgtaattttataattctctatcttattgattatctgtaaaagcttgtaaatgaacatttcttgctaaatgtaaagacacacggaattgcactgattacttctaagacttgaaccattcagagtgcaattaacaaataaaacaagatatcaagatacttctgagaacatgattccatttaaaatttaatcattgctcactaatggctgcgattggagtttaacttattagacaccatctgctgcctaaacatctagggaatatttttaaggaatatctttctagagcaaatgataatcttgtgccaacttgtttatcacttatctggttgctggcatttaaaccttgtaacaacaaaaattataggtgagtgcataaggcaataaatgaaaactaaatatgataagagcacaatgaaaatgtaaatgacttttttccccagattcattacttctggtatcataatgagctatgtaaatgttagactaggttacacggcaagagtggagtgattcagaaagcaagctttattcagacaagtgctagtttgagtatcggctatacctttaaataccattgtgaccttgaataattaagaaacccttgtaaccttagtttttccatcacaactagtgactaataataatgatcttataaattgtggtagcaagtgtgtgtatatttatatacttgcttattttattcatggtccacataatctgggcaagatgatcatttaggactgaaggagtccaaaataggccacccacttcacaatattccactttggcataagggtttctttgagccaaaggcagttcaaaatcagcaggggaagaaagatttatgtggcctcccatattctgcctaaatggagagcaaaatttccttttgtgagggcgttgaaaattttccttgttaaggcatccctttttcccatactgggaatgggagagcaactcttgtcaccagagatgcagagttgacagtaagattgggctgcataaacaaaccttactaaagtggtccttatcttgcattagctttccccccacaaatgtcctcatcccttcctgacaatctattgtctcttaaagcccaaacaacatttcctttgttaaaatggtacagaaacccaaatctaaccacttctttgagtttcacttcttttctgtaaaaacccatgcatgtaaatattaataaaagtgtataccttttctcctgttaatctgtatctgttagtttaattttaagcctcccagtcataaaatcaaaagggtagaggaaaagcttttctctcctgtagtacccttagatattagacatttttactttaatgcatatgtattataaaaatgaaataccttgtaaaaattgaaaaaaaagacaaactgaaaaagctaattcttcaatagttacttggttcaaaaatgcttctaattcctaagagtttttatctttgcatgtcatgtaaatcctaacagttttgatacactctgctcaattaatgtatatttgcaatgtccctctgttaccacttaactattcttttttaagcaattgtattaatttcctaaatctgccatacaaattaacacaaatttggtgtcttaaaacaacagaaatttattatctgacagttctggaagccagagtccaaatcaaggtgttgataagcatgcactcccactggaggctctagggagaattgctttcccagagctttgtgcttcaaatggctccagactttgaccccaaaagtatctgtgacaggtctcaatcaatttagaaaattcattttgccaaggttaaggacacacctgtgacacagcctcaggaggtcctgatgacatgtgcccaaggtggtaggggtacagcatggctttatacattctagggagacatgaggaaccaatcagtaggtgtaagattaacattgatttggtctggaaatttgggacaactcaaagcagggggctttcatgtcataggtagataagcacagaaagttgcgttattttgggtctttgatcaatctttcactgaatacagaatttacatctgagagaggggtagaggaatactcatttatgctttactctggctcagtgaatctgcatttttacataaacaatagggcagaggaatcaatcaaaaatacatttttcgcacgtgaccagagggatgactttgagttctgtcctttgtcctgccctttggcttagtgatttgtgggttccaatatttattttcctttcacaagatgttttttggcttctagctgcaaaactccactctccacctctgtcttcacatggtcttgttcttttctctcagtgtgtctctgtgtctttctttttgtatattttatagggatacttggatttagtgtatgatctgtctggtcatccagagatgcttaatttaattgcatttacaaaaccctcttttttcccaaatttggtcacattcacaggttctggggattaggaaatgaacatatctttcagggctttattttatcatttactttaatggatgggctcacgcaacctctataatttttgctttgagatctggtgttcaaatgaacacatgcatttactaaattgccacctgtgtctttgttccatttgaccacctttgttactctaaaacagtagctgcattgcctaatctgatctcatttcagcactgacctcagcctgactgtattattttctatcatttgaatatcaaaacctttttgatgtttgcctatgctctacaatagaggaggttttatatctgtatctcccctctctactactgggaacattaaccaattttcagaatacagttacaaaaatattctccacttcccaaacctataagaaacaaaagcttctgttaagttctttttttcaaagcatttttttaaaggttacagaataagagttgaaactaatgtttaacatgaagctacagaagctcattatcactcagcagctgacagaaaaaagctttttagccatattatgtaacatttctaggtcccttggcacataaggaccacatcctgttgcctctttgtgggtaactcatgtgaactcacaccaaatggaagcttctgttttaactaattccctctggaagttttgtttgaatctctgctttagatgaaagcgtttctaacttgttctttaacattgatttggtaaaaaatatgaccctctgcaaattgtttagggctaatcctaatactgaatcaagtaagcacagactattaaaggtggagagaagtcacttttcagtagctattgaccttaccaaatcctgtcatccatattacatacagaaatcgttagatctttctgtattaacatttgcaatgattgtggtggaactggaagtgattatcttaatgattttgatggtagtatttttggaacctatgcaaataagatgcctctctgaaccatttccagatcatctatgtattcatatttcaatatggtaattttttaaaagtgtgaacaaaatctttaaaacaagttcattgttagtgtatggtaaattttcatgcatttttaaatttgttaccattaaaatctctgttctttcttactattggtttacagtaatcaggggcccaactgtggaaatcatttcttcttccaattctcccacgctctggactctctaaaatatttcacaatgtgatgtagacattttggtgatttcctttttttttttattgagacggactcttgctctatcgataggctggagtgcagtggcacaatcttggctcactgaaatctccgtctcccaggttcaagtgattctcctgcctcagcctcctgaatagctggaattacaggtgtgtgccaccatgcccggctaatttttgtatttttagtagagacagggtttcaccatcttgccaggctggtctttaactcctgaccttgtgatccacccacctcggcctcccaaagtgctgggattacaggcgtgagccacttagaccacgtaacacatttatcagttgcaagcaaaatattcttaaaaataagtttacgtgtttggagtcatgagatctgggctttagtcctaactgtgatattcaccagctaccagaggaaagatatgttgcttttttcttcagtatctctttttctttattggtaaaacaatggttttgactgttcaatagacatcaggttctttttatctttgttcatctatgccgaagtaagaaagtcctaggtcatatacctttcttcagaaatagatatatatctattattacagatgatttgaaattgaataactgtacgtatctggccagaagagtgttttatgagatagatacaagcccatcaaactgtccctttatattttatgctacatgaattgatctgcctatacaattattcatagaaatatgatttatttataccaaatcaactacagacttgaacatattttttcccacttcttgaatttaagattactgtatcacacacttcttggtttgtatattttggcatcactgaataaacatcatttatgcttttttcttgaggagtttatatcaaaatttttatatgccaagtttcttgacaggattcctaacatttcataattcaatggtagatatagtcagtgacacagctcagtattacattaaacacaacatgataattcctgtgactgctttgttttccttttacttataaccgatttaaatattttcataaagagttatggttttccagacataagtaagatttcaagaactacagaatacatattaacattgtcagtcacaaagttaactttgccaactacttatatctaccatcacaactatggtatttttcagaaaactatctatctagctatcatatctatctatctatctatctatctatctatctatctatctatctatcatctatcaccttgtaataacaagaacttgaggcagctccttttttagctttaattaatcagaatgacttaaaagaggttttataaaatttaattattttggctctacattaagtgttaatgggaaataaatatttaataatacaccctttggaagtattattatggtctcatttaattgaataataaacattcaagttctccccattttttcccaaccagagcaaatatatttctactttttcctgtctgaaatgaatttactaaatataggagttttctgtacaatgagaatcatatctcaagataaaccaaaacaaactgtatttttctggagtatatttaagccaaaaatattttgtattttatcaaaactaaatatttcattaagagcgagcgaaactcaaaaactcattctcaataaggaatgaagggaagtgttgatatgtcctttatttttttttttaacattaatcctgtcacctaaatgagtgatgaaagacatttaattctaaacaagtttgttgtaatcttctggaaaaaaaatttgagtaatagcaagtgtttaaaaatctaatatctatttttttattatgtgccaggcactcttctaagcaaaacgatgtattactgatatactgaatgctcacagaaccctaggagatagcttgttgttatgacacagctgaaggaaattgagacttgaggtattacatggcaagccctaggtcatcaagaatagcaaaacttacgatgaatccttcaagactcatgcacttgaacatacatgcaaaactgcctcataaactaaagactgaaaattctttaagccactttctagctttaaaattcaagataaaaagaagagctcaaacacatataagaatgtgttgcttagctgactttaaacctttgtgtgttaacaattttgatctatagcaggaatcattgaactatggcccacaggtgaaatctcagctgccacttttttgtattacctgccactgtttttgtatataccaagaatgttttatacgtttttctatggttggaaaaaatcaaaataagaatagtatttcttttcttttttctttaatctgtatttgtcaaaccttttaaagccaaatgtgattcaggcactatatttccatttacgagcctctctctgagttatttttcaagagctttacaatatgcctaggtaagcttataattttgctcctctaataatacttttctttggtaattaagccctgtggagagtttaatgctccagtttaacgtatttctagaggactagtacgtgcagagttggcaactatagcggatgcaaagttgaaaaagtagatcccagaagatgtaaaaaataatttttttgtaaacatcaaggtatatctcagaggaagatcctctgagaccaccacctctttaatgaagttctgatattcaggtattagtttctcacagttttccatgacgaaaactctgtacataaaacttaatgttgttatttttctttctgattttaaatagatgtaaaggagcacatcttgggacaaaaagaagagctctgaagaataatatttcttgacagataaaaattatctgaaatgcaagtttctgtgtccataaataatgttttattgaaacacagtcatgcctcttcatgtctatattgtctgtggttccctctacactacaacatcaagtccagcagttgcaatggagatatctggcctgcaaagttcaaagtatttactattttgtcatgtaagaaaaagttcactgattccttgcctacaatgctcaccaggaaagcattgtttatattgagttgggcatataaaattaacacgtttttattttgcacatagataacaattattgtcaaagaatcctgagggatataaaatataggacagaaatctgggccttgaattacacctcaaaactagcaatcattaacaaatgagaacagctaacaactaaaatatgagtattgattttatatgcaatagcgtttaaaataaaggatcagatcaatgttgaaatatacgaggaaaatttcatgcagaggaaatggttgtgcttttaaggctgggatcttttggttagatgtaggaagggataggtgtgatttcattgtgtagcaggaaactcaaggaaaggcaaagaggctgggtgcagtttctcacacctgcagtccaggccttttgggaggctgaagctggaggatcgtttaaggacagaagtttgaggttacagtgaactatgattatgccgctgcaacccagcacaggcaatagagcaagaccttgtctcaaaaaaaaaaaaaaaaaaaaaaaaaaaaaaaaaagaaaggcaaagtggtgatgagtagtatatgagatgacataaatacataaatgtagactcagactctggtgaagagaagaaaatgatttacatggccaaatacagctgtcttgcccatgtagttctggtccctctgtctcaaaaataaaattcttttaaactttaagactacttcctcatgtgccttaagaccttaccaatttggttttatttttgtggttcaagaaacactttcttaaatgtacactacccacccaccccgccacacacacagtctgttttctgtaatctcacagccaaatagctaaatgctatttgagacagctctgtcatcatggatatatgatatatgaggattttgaccttccctaagccttcaacatttctgggtcatcgtgttatatgtttctggaaagtttcctatccctttagcctcaccaaatatttcatgactcctgtgttcctaaagcttataatttcaattttttcttcacatttaccaaattattctgctcttctatttacaggaaaatcaaatctataaggcaaaaattcagttgaattccttttcctccattgatacatatatgtacaccaacagcttagcatgcctccttcctgcaaatgtcaaaaaaataaaaagaaaaaatccctgttttccaaatccaacccacttacctgacttgggattttgcccttgccctccctctgggaatttggctcaatttcatgtccttcagtctacctactggcatcttcccctctgcatgcaaacacatgcatcaaaacatcctgtgattactgacatctcacaaggctcagacttaggtctttccttattatgcatatcctatctgggcaattttattaatatttgtgtctgagactcccatttattagtagttttctcaaagtctctctcattctcacatttcctcacttgggcttccagcaatttaaaatctattaatttaaaagatagtaatctttttaatctgtttaaatttaaaacaatttaaaatctattaatctgaatctaacaattgccaacttcttccagtttttatgtaccttctgctgtggtctgaatatgttccccagcattcctgtgtttttttcttcacatttaccaaattatgttgcttctatttttacaagaaaatcaaatctataaggcaaaaatttagttgaattccttttcctccattgatacatttgtctgtaccaacaccttagcatgcctccttccatacctccagcattcctccattcatgtgttggattaatcaccaatgcaatagtgttaggaggtggggcctaatgggaggtatttaagtcttgagggctctgctctcatgaatgaatcaacgctgcgataaaaaaggctagtggccaggcgcggtagctcacgcctgtaatcccagtactttgggaggccaaggtgggcagattgcctgaggtcgggaattggagactagcctggccaaaatggtgaaaccctgtctctactaaaaatacaaaaatcagccaggcatggtggtgggcgcctgtatcccagctacttgggaggctgaggcaggagaatcactggaacccagaaggcagagggtgacatgagctgagattgtgtcactgcactccagcctgggcaacagagcaagaccccctctccaaaaaaaaagaaaaaaagaaaaaggctagcaagcctgagttcttctctagctaccttccaccatatgaagatgcagcaagaaggccctcatcagatgctaatgccctgatcttgaacttcccagcctccagaattgtgagaaatgaaggtgtactttacttctttatacattacccaatctgtggtattctgctataacagcacaaaacagactaagacaacctttttcattccctatttcagaaaattgaacatccattgtggttcaaaaacaagaaacctcaattttgccttaaatccctgtttctaagattccatgttaacattccaaaaatattttgttgcttagtatcccccataactatctgttctttacatgctaattactactattctgcatgatattctcatttttccccactgaattgttcctcttctttcttatagttttccctccccacaggcacatgcttgcccaatcactcctgttctgttcttgtcatactagcctctcaaacctaagaatatgatcatgccattaacatggttttggaattgccctgcttttaccaataatttccttttatatgcaggaaaaaaatttgaaacctgtagacagctcaaagcccttcatggactctctctgttgagtcccctcccctcccctccttccctcacagattatgctgcactcttcctcatctctggcaatgccacactttctcatagttttgtacagttatagttgtcttcccaggacagtaaagatcccaggacctttgattttctgttttgcctgaaactgattcatcttctggcttgacttcaaatcctgtattctctgttgagcccactctgatttctccaagtaaacccaaatacaactgcatcaatgtttcacacttattaaaaatacgcattgtatagaggtttcatgttaatttctaatctgcttattttgtttgtctatttttcaccagatgtaagctcttgaaacttgtttgaaaggtgtattcttccctctgttatgacaatatagattgtagtgctgcaattcagcttttaacatggtaaaaagaacgttagatgatgagtgtgagatacttggatccaccaaacttcatcattgccattatcttcaccagggatatcatctatcttagtgcttactatgccagtcattatgcaaaaaacatttataaaataatgtcttttaatacttgtaccatttttcaagttagataataacatattctctttttatagatgataaagttgaatcaagagattcatcaggttgcctccagagtctatagtcttaatattgaactacttttctgaatccaaggattaattcacaaatcaattttatgtgcataacttccccagttttgttactgactaatctccatgaataacaaaactatttgctggtttcattgaagttttaatgccaatcacacagtttcatgatacaagaatatgggctttggtcatcatacgtgaaagacacataagggttttattggacagcatagttggtccgattcaactatgttgaattgacaaattacaatgtgcaattgtaattgcaattcagcacattacataggctgaatgtgatcttattctgtgataacagaagcagcatgacattcatattatgagaggtgatcgtctacctctagttgctgtgggttagactccacatagagaactactctcagcaatgatgtaataggtttaaagacatctggactggccaggactggtggctcatgcttgtaatcctagcactttgggaggcggaggcgggtggatcacgaggtcaggagttcaagaccagcctggccaacacggtgaaaccccgtctctactaaaaatacaaaaattagctaggcatgctggtgcatgcctgtaatcccagctactcgagaggctgaagcaggagaattgcttgaaccaggacccaggaagtggaggttgcagtgagctgacatctcaccactgcactccagcctgggctacagagcaagactctgtctcaaaaaacaaaacaaacaaacaaacaaaaagacatagtctaattgggttaagttcaaaggaaaaggaagcttaatggaagagagtttcaaatatactaaatttataataaaaacaaaagatgctgcaacatttcactagagagaacaaagagttgctttccaagtattttaagaacacttatgtggaagagaaagtgaattttgatttgatttttatgtccctataaattagaactaggcttagtggttgaagcaagggtgtcctgagatgaagtgatagcctgaagactcatggacttcaccatagctagaagtgaccaggcatatctcagatggaggtttagtggggatggtatagagtttagatattagaagaatgtttggactacaaatttaagatcaacccagtcctatttttctgtgatgttgagattgtaatgctattgacttagtaaactttcacatttattaagcattatatgtatatttcatttgtaactacgtacttcaaaacaggaatcaaggcagtttactgcttaaagaaaagtgaagtgtgtcttccaatgtagagactttgataagtgcaatgcattgccatgtcttgtgagagcccttccacattttaatgtcaaaacttgatctattgcaaagccaagtgaattgttattcagagatatggaaaatgtatctaaaagtgtccccataaatctgttgccagattgtggtttacatcagactttaaacatttagaatgatggaaagtaaacatcatagaatgatctaaaattataccaaatctatcagaagaatccttcatagtataacgtgaaatggacatccttttatagcactatcaattttgtgctgagtttaaacataaaaaatacttttttggcaatattttcatattaataaattattttcaggaggaacattttaaaatgaaaagaaaatgacaaaataatttccaatatcagaagataatttgataaataaaaataaaataaaaataagaaagccataaaatgaaatatatatggtcatataatatgcaagttgccagaaaaaatagtttacttttaaaaattatccccagataaaaatttcaatctgaactaatttcattaaaattgaacctgattaaaattcatttgagcccttggatggggcaattactgttagcaagactatgtggaattctatacttcaaattcttctcacctgactcagtgaatagaatttcaaatgaaaattacattgtatataacaggagaggattttacgctttaaaatgctactatatgggaactagagaatgtttttacattaaccaaataaaatatttaatttatacccagtagtaaagtttaaaaatactaaaacatttgcctcattcacatttactaaattgcaacttccaagtagacatccctgcctcctctgtgtcctgagaattttactccattttttaaaatgtgcatatgggttgataagtgttgtctactaccttgtaaaaagttgtggctacccttgagaattagttattctttgcttagtgactgaatccccatgaggtctctgactttctagttgtctgtactcacacagtgccttccactgtttcacactgaatactaaactcgtaatattccagagactgggatacatttctagatggtagaactgtggtatacaatttttaggttatatcaataaagaaactgaaaccccattaaccagacgcatgatcatcccttacatagagtataaaccaagtgtagggcttgtcagtagctcttacatagagaatttagtatcacataaacagtcacttcctctccacagacacaaaagtcactgtggctacagtatccgtctcaagatgctttactggtaatctctattcatctactgtagttacttgaaaaaaatgaaatctattacctatcccagccctaaaacttgaaggttcaatgaagcctaaaaagaatagacaacaaaacttggaaatagatttaagaattcatagtgcatagaaagtactattgttaaacttttatatagctttaatattgattaccttctttttttgtaaattacagtagactttagttaaggaacaaacactgggaaggagaaatcagaaagtctcttacttttcagtgaaggcgatttgctgattataaaaaattgtggtgatgaacgtatctttttagcatgatgatctattttcctttaggtatacaccctgtaatggaagtgctgggttgaatggtaacagtctttaagttctttgagaaatctccaaactgctttccacagtgctacactacgcacaatagcaaagacatggaatcaacctaagtgcccatcaatgggttggatatgatacactgtggaatactatgcagccataaaaaaggatgaaatcatgtcttttgcagcaacatggatggaactggaggctgtaatcctaactgaactgacacaggagcaaaaaaccaagtactacatgttgtcacaaataggtgcaaacattaagcacacatggacataaacatggaaacaatggatactatgcactactagagcggggagggaaaggtgggattaggttgaaaaaatacctattgggcacaatgctcgctacccacgtgcaatacactcatgcaacaaacctgcacatgaccccatctctaaaataatagtttaaataaaaaaaaaaaaaacttcttaagtagtaatgttatgtaattgtaattaatatttatttatttatttatttatctttttttttttttttttgagacggagtctcactctgtcgcccaggctggagtgcagtggcacgatctcagctcactacaaactccgcctcctgggttcacgccattctcctgcctcagcctcccaagtagctgggactacaggcgcccgccaccatgcttgactaatttttttgtattttcaatagagacagggtttcactgtgttagctaggatggtctggatctactgacctcatgatccgcccgccttggcctcccaaagtgctgggattacaggcgtgagccaccgcacctggccctgttgatatttatttagggttttcatgagtatggagtgaaggaagtggaaggttataattacaaaaaaaaattgatgaaaaagagaaaaaaaattttatgaacacagtgaagagctcactcataactcaatgagtggagtaatagagcattatggagagtccccacatcatattaatatcatcataacagacatataagaaaaatttagacttagaagaagacatacattaggcaacaaaaagtcccctaaatggtggatatttatttcatgtaaataaaatactcaattagagaaacaattttttgtaactggagcttaggtccacttcagaaaatagttttaaaataaacaatatttatttcttccttcaaaaatagttttgagtataatagaatttataaagaattagagtaaactttatatatatatctattaaaatatttcatgttataaattgaaagaaaaatatacttatgtatagatgctagaaaccttaaggggactcaaatatgctactttgtgtttactttttttcctattcctcctaagagcagtgaacatctaaatatatgtagtctgtgcttctaccctaatgtttatggtaatttgtaactgagaagctgacatttttagtgctaataattgtcaacacgactttataaaaattaagccttggaaatgcaatactttagagaaatccctttgatcttaaaataatgtttttgagctctaagttattttacattatacacaggtacttatatttcattatatgaaacaaactaggcacttgtgtgttttttaaaattgggaattaaaagaatctatacaaacgttttttattagaatgtcagaaatactttctaaaatgatatagttagttaattctctctgtgaactctaaaaacccaggaattttcaagttatgtccagttatatggaaatgaccaattcccaatgtctccttggcataataaatttaattcattatatggaaactctaaactaaaataatactatagggcactatagactctctaaaggtgccccttactcaacactaaaataaaactgcctttagaataaagcactttaatatactttgctgccatcaccattcactagagaattacagccatggaaatgagggcgtgttttaagtgtttcttactcatagtccaccaacaatttaaaaattttgtgtagcaccataaaacagtcaatggataatcaaaacatcatatacccaaagcttatttgcctacagtaaaaaaaaaaaaaaagtgcttttactatagacaacaaatactttcacagctagcatttcattcaaaattatatggaagcatcttgcttactaagtgagacatctagctatctttcactgtcatattttttattggcttgattggggtgcaattgacatacaattaactgtgcatacttaaagtgttaacaagaagatatttgacagatgtcagtcctatgataataaatatatcatatatgtcacttgcaaagattctttgtgccactaagtaatcccattttcctatccccattccactccacccttaatcccaagcaattattgatcagttttctataactatagattagcttaaattttctagaataattgaaataaaacggcatgtactctttgtctatcttccttcactcacagtaattatttgagatccatgtatagtaatatagtaatgtgttatactagttcattattttttattaatatgtagcatttcattgcataaatatatcacagtatatttatttgttcacctgtttataggcacatcattgcttccgctttgggttattacaaatgatattgctataaatatctatgtacatgggtttgtatggcgtctgttttcatatattttgggcaaatattgaagagtggattagctggatcatatggtacatatatatttaacttttaaaaaatgtgccaaaatattttccaaaatggttttgccattttgcattccatcagcagtgtaaaaaagttacagtttctctacatcctcaacacttggtagggtcagctattttaattttcaccattctaatttctgtgcttttgtaactcgttgtggcacaaattggaatttccctttaaaaatgttgtcttttgtattttgtccatatgtgtggttgtttcagtcaggaagatatttcttgtccagttccctccatcttggccagaaatagatgtccccattagtagaaaattttaaaggcaaataaataaataaataatgaatgaaaaagtaaacaacagataacatgataacatgagatgataatatgcttgaacattagatgataaaagcattgaattaaaaaaatcacaaaagactaagaacataaacccaatgtatcatcatagctccataagctattgacttttgttttactagagagatgtatgcattgtaattattacactttcctgaatctagggattttatgacataagtgtagtttattcaaccttgactgaattttcttctctaccatctcaatgatatccttctttgagtcattacaattataatgtaatcagactttgtgcttggaggcaatgaaaattaatccttaagttccaagaaagcagacactgttctgttcactgtcatatctcttactcagaacattttctgtgacagagtatctacaaacactacatgaatgattaaattatagtgaaagaatacattaaatagatgttctaattgtatttataaacttaattataattaatgtataattagtggcatttaaaaaattataaggcatattattgtattgaacatatgtactacctatgttcaatgaggtatgtctgcattattgaagatacattttatcataaaaaggattagattgtatataataatatagtaatactatgatatacaatgctttgggtagtcacaatgactccaagcttctttttaaataactgcagagttcactgtaataacaggctttaggagcacagagcttgcattcactgagtcatcatttaacacttttttttttatttttaacttctttcataaatacaattattaataaaaattcttttggagttaaacgatcttcattcaattttaagcatcctgataaatttgaaatacagaaactattttgtgttatcattttaatatagagtcagaatacatacaaggcaatgcctattccattggaagtagtagttacatcaaattaattatatccaatcattgtctaaagaagaaaatggaacaccattctgatctacaattattttcaaatataaattggtggttttaagccacaaggagtgggatagtttctgcttttctttttaatgaattttttagaagtacttagtgtaaagtaatttataaatggagaatgttgttaggaactccaccaaaacattgcatctgtgtcacttaagcattttttgttcttctacaaattacattacacatagtatgtcaatgaagaaaaaatatacttgacctcagtgttaattatgatcagcagtaatttccagaaaatattccagaaagaaagaaaatattaaacattactgagatcaagattacctcacagtggaatctttatttcatacacacgcatactgaaattgttttctgttttctgtagagacagagaaaaacaaaagttgttttcctgaattctttactgtgcaccttcaacaatgccaatcaatgcatagaatagaatggaggccaggaacaatgggacaatacaggagagtataggtactcaccagccttcctgaatgcataaagtaaaaagagatatgcaaaagtcattggaaagatatttctatttgtgtgtgtgtgcacacacacatacctaaacaatagtgcagacacccaaaaacaatgaggaaaaaataccaatcagtttcaatttcttgcagcctaaaaggctgtttaactatggaataaaaatttatgtcctgatggggaatctgttttcacttagattcctcagtgcaacagagaaaactgagcagaacacacagggccataaacagtagaagttttggtttctgaaagaaacaggtctgtggggctttgtacatagaagtagaaatcattccagaaattattggtaaaggtattacatataagataaggcatattatttcagcaacatttttcaaaggttttctagtctgcaaagcctcctaatgaacattatcaataaagattgtatatatgtaaaccaaaaataaaattctaagcatccccccccaccacccaaccatctgaatggacttcctcctcagccagggccctcttttgtttgtttgtttgttttttaaagaaaatattttaatgttcatggaaagtgaattttcttttttccttttcttttgcagcatactttatttatttatttatttacttttaaagttttttcctggtcagcaaggggcactcttaaaatgcaactgaagagacagtttcaggccatgacgggaagtgggtattggacctacctcattacgtgtctccagcattaacatcaacacagactttaagtctgataagaaacattttacaacctattctctctgaagcctgctatctgaaggcttcctctgcaaataagaactttgttccccagcaacctcttgtcttaacccagacattccttgctattgatcccaggtctttagagaaactcaacccattttcaactggaacattcttaagtctacctataggctggaagtccccgctttgagctgtcccacctttctggatcaaaccaatgtatttcttaaatgtatttgattgatatctcatgcctccctaaaatgtataaaaccaagctgcgccccgaccaccttgggcacgtgttctcaggatctcctgagggctgtcatgggccatggtcactcatatttggctctgaataaatctcttcaaatattttagagtttgactattttcatcaacatataaaaggagctttgtttaattaataaactgatggtgaaataagaagactaaatacatgaaaacagtatgttggcacagactaaaatgatgtagtcaatgtgggggttacaacacggctatggtgatataagaatatgaatcagaacagacttttaggcatctattgcaaaggactctcactttttctttggagaaaaaaataggaaaatgtattagcttgtcttgaatgcacaataattttatatgtttattgtataaagtggaataagtcatgccctcagaacttttgcattctatgcacctgcaaaagtagcactgcatagaccccatcaaggtttccagcttgcaccatccacagcagtgggttgagctgcacctgttcctgcctgggcttctggtgaggcagccgaggagcactgcatagaaatgcatgaagcagacactggatgcagtgcaacacagcaaatgctgaggttccctgggtcaccctaggcctctcttttgacatattttcttcccccaggccttggcactctgggcctgtgattggaggggcagtacagaggctcttccaagtgcctttgggatcattcttttattatcctgatgagtagcctctggtttcatttaattcatcccaatctccttatcaaatggtcacttggccacacccttgattttccctcttgaaaatgcttcttcaatctctatcacatagccagaccgaaaatatttcacaaccctaaattctgtttttcttctagttaaaattctgtctttaaatcatttttttcacacagtactatatgcaattaaaagccacacagcatcctgaatgctttgctgcttagctatttcttctgccaaatatcttactttatcacacttaaatgctgtctttcataaagccctaggacactgatacaattcagcccagctctttgccaacataaaacaaggatggtattttctccagtttgtaatatcttcttcctcatttacatctgagccctcttcaaaatggtctttactgtctatatttctaccaatattttggtcatgaccacttaaatcatgtctaagaaggtccagactttccctacagttcttctcttctgagtcctcaccagaattgcccttagtgcttcttctgtgacaatatgggctttttctagtgtgcccttctaaattctttcagtctcatcccattacccacatccaaaggtgcttccacatttgcagggatttgttacagcaacactcactctccggccccaattttctgtctcagtccattttgggttgctctaatagaatactacagattgggtaatttaacagaaattcattttaacagaaattcattggctcaccattctggaggctgtgacatccaagatcaaggggccagcatctggtgagggccggcttgttgcatcgtctgattgcaggagggcaagtagagggcaacaaagggagggcaagtggggccacactcccccttctataagaaacccacaaccatgataagggacactgctgcaataaaagcattaatctttttataaagctggggcccctcaacccagacttctcttaaagatcccctctttcaacactgttgcattgagtattaagttttgaatacacatcttatgggggaaaacattcaaaccatagcacccaccttttcccatcttcaaagtcagcaatggaagatcagtcccctctcatgctttgaatcattcctgctttcttcatcatcatatctctctgactgacttgctgcccaaaacgcagccaagtgacttaaacggtgccaactcagactgttaaaactagaaaagctaaagatgcaaactttgcctttctaaatattttattattcctatcgaagaacctcacatattgttccatgatactttctgactatgaacaaggtgataaaatataagcctattcgttgctatgtttgaaatggaaatagaaaaatagaaaagaataacatgtggcagatatttgtgagatagcaacgtgcagttttcattaaaggtcagagattatataacactagaaaaggaaaatccataatagcaatagatgttgaaaaatagttgtcactattcatttaggaaaattctgacaagtacacaaatttacaattgagtatatttgtttataaactaacataaaattgaagttgtcaagtttaaaataaggacagaaaaatacagtgatacttgttcataaaagcaacttaaataaaaaccattttgcctattagtctggctattttctgtctctggttgctataaactgtaggaaaactcattttggatatttctggttttttttttttttttttttgagacggagtcttgctcagttgcctaggctgaagtgcagtggcacaatctcctctcactgcaagctccgcctcccaggttcacgccattctcctgcctcagcctccccagtagctgggactacaggcgcccaccaccacgcccggctaattttttgtatttttagtagagacgaggtttcaccgtgttagccaggatggtctctatctcctgacctcatgatccgcctgcctcggcctcccaaagtgctgggattacaggcgtgagccaccgcgccctgacgataatgctggttttttaaattattctgataatattgaaatgaatattttttccaagaggcagcatttccaaaatgacaggacacctatttgtataaatgtgtgatgtttatttattcatattgtacacaagagaattcctggatcacaataaattcaaaatcaccttccacttggcatacctcttagagcgatcttaacatgctttccagagcaatatgcactcaaagtaatcactcaatgggagcacttgtctttatgttctcattcaattctagtgtttgttgctggtgtaaggatgaccttgtaacagtccacttgtgaaggaggtttaactctgggttggctggtgacctatatagggttactatgcaatgcaaaacaactgtatgtattttgaatagccattttttttttctcaaggatgcagtgaaagttgcatttagagaacacacatttgggctagacagaaatgtaataaatcattaagacagtcctcaccatattaaaccctaaatagttgtggcaggtggtgacgtgctgttgcaaaaatgcatcgtttgtgcttcaataggaaaatgatgagattgagtttggggataatagatatttttttcaaaatgacccatacattttttaaaacattctgcaagggcagacatatggtcactgggtccatgacttttagagagtctatgaaactcgggtcaatgactcagggaacagacattccagaaggtaagtgaaatggcaagttaaaaagaaaattcaagtgcgacactagttactgagtggcctgtggaaataatttcacagttggatgggtggtccctccaattattaaaaatgctaaccagaaaattttctagcatgattaaataagattctgttgtaaatgtttttctcatatagaaggtctgccatcatatatgggcaactatgggggcacttattaattactttttcaatgaaagttagttgagacagaaactgtgtgttctagcttccagcaacacagattgaacaaatggccatgaagattgcaaaataatgctgtccatcaggatgtaagtttgtaattgtagaaaagagggtcacttcagattatgggaagagtttgctttttcatgaagttgatatcagggtatatagtctcagagaagatttccaaggttcatcaaaatttgtaagagcatgagcatgagaaaataaagctggaaataaagagagtatgttcacaatttggagtagcccctcagtggctacaaaatcatttgcttaatcattatcaaatgataatttactgatatgtcaaaaaccaatcaaatcatattattcatgattaatgttattaatcattaatatctcttaatggatattaattattattgattgattgataataatatctcttaattgatgataatatctcttaatggatattaatttgatatattaatatctatcaaatcatattattaatgattaatatctcttcatgttcatatcacttaagatttaccacccttcaagggacttgttccattgtctatttttctaataagggattttgatatttgattcatgggttaaaccatacctttattggggatagaaactggataatctgtggtgctacttgaggttttttgttgttttttttctctcaggcaagaaaacaatcttacagcaatctggaacaacaatgctagaaagattgagattttcacgtaaaatgggcaagtatttaaagagcagggctctgtggcagtataattcagagagctaggactttggtctatgacacactaatctcatctgtcaaatgtggcacccttcatattggattgctttctctagtcacaggattacatttcccatccatagatcactcagtgctataaactaattcaagctcttccatttagcagcctggaaataagtatggtttgacataactgaacaaagcagaaatgaaatcctggagtctattttaaatgaaaagagtctaagatcaggtgtcaagctttgactaagattctggaaagagcatcaagaacagacattgtgtttggtaatactacttccctccagagaaactgaaaatactttgagcagcacagaaaataatgtcccagaacaaagataaatcgcaactacagaaggtaaccaggggtcagagatgcaagcagagaattgagcacagaaaaaattttaaagatctaccaacagatctgcttactactcaattcaacttttgatagaacaaaccttttgcactttggcacaagggcatcttaagggcacaatgcatcctctaatgctctcccatttgtagtttctaaatatatatatttagctgtatctttttggaaaaattgatatttgccttacttaatataggatatttctttctcattttatttaaagtaatgcaaagtctttcaactgcaactagttttattccataatgttactcccaggtgtattgtattccaagtgagtttttcttcttatttataaatgtactggcttttagtttgaccactgaaatagtggggaaggcagtcaatcaaaatgtacttgtgtgaattcaaatgaaacttttgaaaacattaacaagattgaaatatttaaaaggtcctagtatgctcactaagtgcaaaagtgattaatctttttaccttaatgttggcagcaatcataaaatacatgcaattaaagtctataatggcttgtatttctatggtatgtactgtgaagttatccaagaaataatgggatagaaaaaatagaatatatataccacgctctgcaaataatatctcctaataaatgtgtttagcacaatgcagtttggaaacattcaactgtcaaatatttgtctgtaataactgtttttctgcatagggactgtgttaacttctagaataatgggaggcaatacttctttttaatgatcttactgatttctagcttaagtgaataaacatcttaaacaagattttaaatgtgaagaagagtgatgatgaagacaccatcagtgacaaatttttattattttatgcaaagaaagggctattatataccattttaaattataaatattttcatatttcaaaacattatgaaaattatgcacaacataaaggttcttattcgggtaggttacagaaattttaatctatgtattcatttaatatttttactgaggcaaccagtcattttacaacatccattctactttaataaacatccgtaatgcccataaaagtgcttatctgaatagactgcacttcttcgtttcctttatatatagctgtgggcctgtaatttctggccaattggttacaaacaaatgtggtgcaagcaattgctatgaagacgtaatctttttttttttctcatttctcccttcctgaaagctggaatgctattgtcatgactagcatcagaacagtcacttggaatcacaaagtggaatctagggactaaggatgaccttctgcattaaaaactaaaacactgttgagaaaaagtggacaagaaaaatagagatatgtgtcatggtcttagaagactagatattatgaaaatgtcaatatttcctaatttgatctttagaatcaatgaaatctcaaattaaaacactgcaggattttttttttggggggggcaggcaaatgtgtggtggaaaggcaaaaatggacaaacttagtttaaaaactatacagtgatgtaaagaaactacaatagaaaaaacaggcttgaaatacaataagagtaatcaagatggagtagcactggcaaaaagataggcaaattaatgaaacagtatacagttatattctctcttcttctcttttacatcataagaatgaaatatctaggccgggtgcggtggctcaagcctgtaatcccagcactttgggaggccgaggcgggcggatcacaaagtcaggagatcaaagaccaacctggctaacatggtgaaaccctgtctctactaaaacatacaaaaaattagccgggcgtagtggcgggcgcctgtagtcccggctacttgggaggctgaggcaggagaatggtgtgaatctgggaggcggagcttgcagtgagccgagatcacgccactgcactccagcctgggcgactgagggagactccgtctcaagaaaaaaaaaaaaaaaaaaaaaaagaaatgtctaaatagcctggtagagaggagctaagaaaatctggccgttaatccatttcctctcttttttgtacgggggaggaagtatttgacaccacaaggaaagaggaaaatgtcaggtgatctagtataatctctgttaatgggaccgctgggtaactagcttgatgatatttgcaaagagactgtatctacacagtctttagcaggctatttctggccaaaagagtattaatagtaactaaactctgaatctgtggacctatgagatatgcctttttagagaatgatttgtaagctatacaactcttatggtacaaaatagagctggttcattacttaaacacaattgactcctttttgtggagagatataaacgttactcagagactccaaataatacttaggtctaggaaatctatcactgcaggaagaaaggtttgggaaagctgaaaccagaggttaatctgattaggtccaccaaacttaacctgtcctacttgctttttgttattattattattattattattattattattattattattattgttatttctcatatagctaaaagccacaccactaaatgttataatttaaacttccctggcttccttatagataatatttctgacataggtgtcactgtggtaacagtggcttaagttgctttttcaggagctgggggcagcttaaagcatttgagaccaccagtcattcaactgcgcctgcacaaatgcccaagagttggtcttttgacctcagagggccaaaaactccacctcagtttatgctaatgctgccattttctgaatatgtgtcctatgatgagtcacgaacccttatggcatttgtgtagatcaccaattacttcactttttcacactgccaatcacctttccccatgcattaggcaaccgctcttctataacccataaatatccctaaggcttatcttcaaaaaaatagatttgagagctgttcttccatctgctcgttgaggtacactgtgaataaaccttttctcttttgcaaaacctgtcatcacagtgattggtttactgtgtacaggaagaacaaacctgattagtttcatgcagaaattcaaggatcgttagagaatactgtgagcaactatatgtcaaaaaaatgcgaaaatctagaagaaatggataaatttctagacacataaaacctaccaagattgaaccatgaagaagtaaaaaatctgaacagtaacaacatcaaagtgatcataaaaagtttcccagcaaagagaattccatgacctgacttcatcactgctgagttttatcaaacatttaaagaactaataccaatcctactcaaactactccaaaaaatggaggagggaatacttctaaacaaattccacaaggccagtattatcctgatactaaaaccagacaaagacacattttaaaaaaatgaatactgatgcaaaaattctcaacaaaaatactactaaacagaattcatcatacctggcttattttttattttcagtagagatggggtttccccatgttggccaggctggtcttgaactcctgacctcaggtgatctgcctgcctcagcctcccaaagtgctgggattacaggtgtgagccactgcacctggccagtagcatttctttatgtaaacaatgaacaatcggaaaaacaaatcaagaaagtaatcccacttacaatagctacaaataaaattaaatacctagaacttaactaaataagtgaaagatttctggaatgaaaactatataacatttattccagagattgaagaggacaccaaaaattaaaacatattccatgttatgaattggaagaatcaatattgttataatgtccacactactcaaaacaatctgcagattcaatgcaatccctatcaaaatgtccatgacattcttcacagaaataaaaaaaaaattctagaagtaatatggaaccacaaaagacccagaataatcaaagccatcctaagtgaaacaaaaacagaaacaaaaacaaaactggaggaatcacatacctgactttgaattatactacagagctatagtaacaaaaacagcatggtactgacatggaaacagacagagagaccaatgggacagaacagagaaaccagaaataaatttttacatctacagtgagctccttttcaacaaaggtgccaagaatattcattggggaaaggacagcctcttccaaaaaatagtgctgggaaaactgtacattcatatgaaaaagaataaaactagatgcctatctctcagcatatacaaaaaatcaaatctaaatggattaaagacttaaatctaagacttcaaactataaaacatctacaagaaaacactggagaaactgtccagaacattgggcaaagatttgttgagtaataccccacaagcacaggcaaccaaagcaaacctcaacaaatgagatcacttcaagtgaaaaacctgtgcagcaaaaagaagcaatcaacaaagtgaagaggcaacagaatgggagaaaacatttgtaaactacaacttgacaaggtattaatagccagaaactataagaagctcaaacaactcaataggaaaaagctaataatctgattttaaaatgagcaaaagatctgagtagatatttctgaaaagaaaatgtgcaaatggcaaacaggcatatgaaaaggtgcttgacatgattgatcctgagagaaatgcaaatgaaaactataatgagatatcatctcaccccagttaaaatgacctttatccagaagacaggcaataacaaatgctggcgaggctgtggagaaaaggaaactcttacactgctggtgggaatgtaaattaattagtacaatgactatggagaacagtatggaggttccttaaaaaagtaaaaatagaactaggatgtgatccagcaatcctacttctaggtatataccccaaataaagaaaagatgtatatcgacaagatacctgcacgcctatgtttattgcaagactattcacaataggcaaggtttgaaagcaacctaagtgtccatccgcaggtgaatggttaaataaaaggtagtatatgttcagaatggtattattctgccataaaaatgaatgagatcctgtcatttgcaacaacgtggatagaactggaggtcattatattaagtgaaataagccggaacagaaagacaaacttcacatgttcccactcacctgtgaaagctaaaaattaaagcagttgaatccagggagatagagagtagaatgatggttatcagaggctgggaatcattgttgcagaggggacagtggggatggttacatacaaaaatatagttagataaaatgagtaagatctagtatttcatagcagaacagggtgactgcagtcaacaataatttattgtacctttttaaataattaaaataatataatttgaatgcttgtaacacaaatgataaatgcttcaggtgatggataccccatttatcctaatgtgattattacacattgcttgcatgtatcagaatatctcatgtaccccataaatatatacacctactatgtacccataattgttttttaaaaaaccctaattggtattaaagccactgcctatgtcctatttcctgattcccctctattcatttgagtaacatgattgtctgtaacctaagactgttggtcaaatttgatgcttactaagatcactcagtttttttatgagtcctgtttgacaattattccctttgttttagctcctaggagctgcctctatagcttttgtcccagaataagaagttaaatgaaacagacccacagttgacacttagcctgaaggacagaaaaaactagccagaaatttgtatgtaacataacaaataaataaatatttattattagagactgagatttaggatttcatttattaccccaatgaaggtgactagtatggcaggatatgtttgaagaggatcctctttttaagcaatttatactcagggttgcatttgtagtttaaaagctcaaaaggcgccattttgtctgaaaaagtagaacctgagaaggataatgacagaatctatagaatcacaaagattatgtaacaaaaattgctaaggggtggcatgatggtcattcctttcataaaagtattcctgaattatctaatagcattttttttacattttaatttgttaaactttgtgagtacataataggtgtatatatttatggggtacatgagatgttttgagatagtcatgcaatgtgacaatttaataacttcttgataactatggattctgtggttcagaaaactctctaatcttttctacatagttccatgttctttctttatcattatgtttcaattagccataatatttcccacagccataatatagatattaaaatgcggcagaggtatggtaaagaatagcaaaacctcagtacccccgcaacacacacattaaagctttatcagcaattattactatctaggagtgggatttaggcttatttttaaaataaatattctgtcagtttcctttaaagaaatacaaatatgttctgcaagtgaataataaaactgctttacttttaggcaaaatttatttttcttctgatgaactggttttgatggataagttgcagtattaaaaaatggagttgacatgtgaaaagaaagtattgcacaattcattacaggagtcaatttctagtctttctgtgtcaattcagatatcagaagtcatgttcttaacctagactatctctaaggaagttataaaaactgagattatgataaataacactagaatacgctactgaaaaatgatttctaagtagtgcaatcaatatccatttatagacacacaaaactgtagcccataggattcaaaaatgtactgcaagcaatttaaaataaagcaatttcattactggaagacagcagaaagcttcttagggaaaattctaagattttgttggtttatttaaattttagattttagtaaaaccactaatatatcacaatctcctgcccattttgtttttaaggactcaaagcaggtaattcacaaagattgcaataaagcacaaacccagagccattaaaatggaaagtgtctatttatgctaatcttttcctccaatattcaccaaaaatgcaggttgctgtatattctttattaaggctatataatgaaactttttctacatctaaatgacacttttctaggaatatatatatgtgtatatatatacatatatatattctaggaatatatatatacacatatatattctaggaatatatatatacacatatatattctaggaatatatatatacacatatatattctaggaatatatgtatatagaaagttatttaagtgacaatagttcagaggtacttgtcagacatactttcatcagataaattctacatggaaaggcaggggattgaatgggaattttaatgtacatatcctttctgggtaacattaaatttatctcctctactgactttcttaataagatgatttacatatctgttgcttttctgttggtactttctggatatttgtcattgcaagtctgttaaatcacttgcaatggcctctgactgaatgtggtgcatgaatcctagatgctattttcgcaacttaatttattgctctcttttctttgtctggtttctttctaaatacccttcaaaatctagctaaagcatcacaattttcaggtagcctttccagaatgattagtgtgaccaaaaaaatgctccttcatattctaatagtaacctattcttaacatataacacagctaactagtgataatcagaagtctactggtgatttttcttcattaaactttaattagaaaaaaactccgagatatttaaattatcattttttcagggaaaaataaactatgatatttgaaaatagtcaccaaattaaatattacagtaataaagctaatctctgtgaagagataatggcattctgcttctatccaagaaagagtaacaggaaatggatttatgctcctgccctaaatcaatataaaaaatatatcataagagttttcaagacattagttaccagcaaacttagcatagtgatcttgagagacaggaaacaaatgaatggaaccttatgattattctgtgttcctgccttgatagtttccagggtattgtgaagaatgaaaatctaagacagaacttagaggatgtcttgagtttgggacacagagctaaaataccagacagactgtaacccctacagttcatagtgctgagtactgtagagaacagagagagagaaaaggagaaggagaatgaatactggagatctgaagagagtcaccctatattattcaggaaagtacgataatgagaaaaatactcaactcaaggctaggatcagggagggagagaaaatatctgacaggttacagagaatagtactcagaactcacgcagaacagggaatagtatgtttccatcaaccacattgaacgcataattcacggatcactggatagaacattcagtattcattagtgaaaaaactggtgacatttgagtaaagtctgtggttttgtcaacatcattgtatcaatagtatttttttaattttaataaatgtaccatgattgtataagatgttaatattagtgaaagttgagggaaaggtacttggaaagaccctgttctattgtgtttttgagtttttttataaagttaaaattatttcaaaataatttgaaaacaagagtcacatcactatatatgatattcaaatggctaataaacgtgctcatgtacttatttttattagtaattatggaaacggaatctagtactactacatcttcagtggaatagctaaaatagaaataaataataataatggaaatccaaaaaaaagaaaatgggcaataccaaatggaggctagaatgtagaacaactagaactcttgtaacacgattatttggagtacaaactggcacaattgttttggaaaagttgcctgtaattatctaccaaatttgaacgcattcacatactataaattattaaatcaagttgtaggtgtacacacaacttaatatatagcatacatattgtttacaataatgttcacatatgcaccaaaattataagaaagtatactcatgttgcactcatactcaagcaaatacataattttatattcaattttgataaacaggcaagtcaactctatcaggatagagttgacaaatcaacacaagtcaggatagtaactactgtgggcaagagagtaagggtaaattgaaaaggagaaggaaggggcatctagcagatggtaatgttccaatctgcaaactgtgtggtagttacatggatgtgttaacctcatgacaagttaacaggctattcacttttctgcacttctctctatagacaaaaagttaaaaggtacttaataaaaaacaagtttctaaattagtctcatcttcagttctttctttcttggcttgtttttttacaccccagaacatcaatgtactacttaaaaatgaatgaatatatttgaatcattataagagtaaatattagtacctgctaagaaatcatttctaaaacttactggtcagaatgattctatctggttttatatagatatctcatcttgttaattccctcctgtaccttaaaaaatgctaacctatactttaaatacacttgcccatcaaactgtatccacaaaaattaatgctaatgagtaaaatcaaagtggaagcagagggtatccattcaggattcatcagaattatgcttttgtttacaaatctaatgtctgatttctgtaagaccgtatctctgacttgttattgacaaagattttagcactaacatttttatacctgcagcaaaaaacaatttgtcttgtaggcaaatgatacctctatttcagttttcttcgaattcttccatgaaaacatcttgtctttaatttataagatttagcaaagactacctccctgggaattaaaaaacaagcaagaaacaagctgtcagagaaattttactccattctgctgatgactgtgtttggaatgtaattatcacacagtcagtggtgggtccaggttccgtgaagactgaagcttacatagttttttgggacgtcttcaagaaaaaaaaagggagagtgcaaatacatcttatgaatgaaaattttattgaaacataggatgatgtgaatacattgttagggccccttctttgggatcagtataagtgaaagaaaaattgtttctttttcttcatggtaagtccagtccttaatggtatctctggttctatggatagaaccaggagataatcacataaagcagatgtcaaaaagaagagacacctctaggggaagagcaagcaatgtaaataaatgaaatggggtgtgtttaaagaaattatagtgcaagggttattacaaatggcaacttgcaacctcattctcatggaagagataataggggatgatgtaactatgccactctgccttgcatgatggaaaacagccaaatttcaaatccactcaacttcttacacatagttgactgttgttcactcttcccttattgaacaaatcaaaagaaatctgtattttcattataaatatcccattttaaaaaattagcattgaatttaaactattgagtatctccctttgaatatagaacctgggattttccccaagccttatatacacaaatgtaaatagaactagtgaaacatggccctaaaactaaccccggccataggttgaggctaaagataagtagtgagctggccctgaacgttttaccttgtttgtaatgatttaaattagaagatactcctttccccaccaaaataggggacttgttgagacttggatacatatcttagatttagggaattctgatgagatggaaaaaattcagtggattgacaaaacaattaggtctgtagtatgtttggcctaagctctcctcatctttgttagttttcccggaaatggattcaaagatactaagtgggttataaatgccactgtctttatcagaagattgcttgaatgactaggaatccatggaaagaccacctgaggagcctaatgctgtgcctcatgtttaatgggccaagctgtatctgtaccgtcattttaaatggaaatatacaaagttaagaaagaaaagcagcaacagtgtttacgacatacttcacaggtgatgtttgttcaggggtaaaaaatagggtaagtgtaggcagatggattccaaagaaatcaaaagcttgtttaaatgcaaatgttcccaggaagaagaagcatttagagaagaaatgatatataaataaagttcctctcagcagaatgttttcttgctcacgtttacaagaggcaacctcaggtgtctaatggagatataaggaagaactaaaagtggatacctttgtgaaaggagttttggtgcctctaaaagcctgctgtctgagatactttatttagctacggaactgaatgtgcaaccaaattacaatctttcttctctttcaattttgtacactgatcttgacttcaggattagttgacacttcaagaaataaaagtgcaatttagccttccttttaatctccacttaacttctgtgataacaagcaactgcttagcaaggtaattaatgggaaattatgcttttttattggcaacttgggatgtacttctgaagagcaagacaggaagcactgaatcataatgtggtactaattattttctatctcagctattttggtcatagcaccaatatgagtcggtaatctgaaagatggggaagagaatatctcttggcccaccaagaggacttatttgaggggggagaagaataagttaaatgtctcctatgtttgaagatacatgatcaaacacaaatctcttattttttacatgtggcatcattattacacacgacatacatttgttagatcatttaatcccacagaatacagtgtgacaattgcttaagaaaaaaaagagatgaaatcttcatacctcactcagacttttcagcagtggattaaatgaatatttagcaaagcaagttagcagtttgcaaatgtgcaattaaaatcctggctcttctctaattatgtaacacaagttaaatggtcttaatagacatataatgatagctttataaacctatagttacttataatcaaatgtaatttctatttcggttttaaagcacccattaaatgtctattatgatttttaagtaatttggcagacatttaatgaatactttacaaacctaaatagtaattatttcaagagacaactgttaacatataggagtaacagctattcatttgaacacatggtttaaaactaattactgagctatttatgcaatacccagtggatttacaacaaaaagaaaatcataattttattgtaatcttatctcttaaaatagaaacaatttttttctaattttgtgctgggttctgtgacataacctgtcatcttccaaaaatgtaacactggtaagtcaaatcttttcagaataccatgaatactccagaaaattaattttgttctgggcagagaaaaaatgtattttatgcattaatttactgttatattttgggtatgttgctaggagacttaaatgaataaaattcaatgtagacaggttctttcttattgcaagttgtaggtgatgaacctgttttcaatctctcagcataatgctacaaatattatcaaaagaccactatttctcactatttataaaacaggtataggttggcaacatcttttcacacctaaaatgcttaaaattctttaacatgacagaattttatgttacagtacagccactaaacttttctcatgaaacagaaattattatttttggcccatgcagcagttttgagcattataggaggactttactgcctatttcatgggtgattcacattaatttgtaaaattaaaattgctttattgtttctgtgagatataggtattttaagtctgaatttccaactctggttgacgtaattacacaaattagataattatttgaaggtgagaaagaagttttcataccaatgtgtattaatatgtattatatttaaattatcattatagtattatggagagttaatttcataatttagtttttttcatatacactctgtctcagcattgtggtcatttgtgatttttcatatcctaacctgtctttccttttttgacaagaaaaaataatgcaatcattctctctctctactagctttacttatttatcatataggtatatgtagcatccataaaataatacatgtgtgagtctattatatataaacaaaataattcatacagaattctcattacataaatatgtgtttgatttactaacaccattaataacagaacaggcaacgtgctttcctgagtcttttcttgagactcgactgttggtctttttccatgttcacgcactaacatggccaagctcagttctctactcagtcagaatggctaatgaaagatgactctgtttctctctaagatccagtctagatatagccatatttaaagagggttctcactcctgatttattctagttcatcttggacaacaatttagtcttagagaagagggaaaaaatgcatctctatctcaagaacatgtatatcttcttattcttatgaaatatactagatagaaaaaaaagagaaatacaaaataaaaacaggagtcctaaaatttggatagcccaaccccctttcgcaaattcaatggtatctataaaattcatgctgggttacaaataaaatatagttaaatgagttataactttatttaaatccatatacaaataatattataaactagaacatttatatcttcttattcttatgaaatgtactagataataaaaaagataaataagaaatacaaataggagtcctaaaatcctaaaatttggatagcacaacctctactcacaaactcaatgacatctataaaattcatgctgggttacatataaaacatagttaaatgagttataactttgtgtaaatccatatacaaataatgttataaactaatacagtgtgatgtttagaaaaagctaaccattaagtctctatttatactgcctatgccttatgatgttatacattaatacaatttttaaaataacaagtagtcatttgtatacatgtgctagaaactcagcagagaggtctgtactacatacactgtgcatcagtctgccaaggattggcatgtagatagtgatgccatatagtgatgtgagatcaaaaagaggttgcatagctaaagaaaagaagaatatcaaagatagagttctataatatccaacaccaaaagttcaggaaattaggacaagcaagcatatgagactggacagatgtcagaggggtagggaaaaaccaggcaaaaatagatgactggaatccaaataaagccattcttccaaaaagcaggagatatttaaacatgttatatcctattggtagatcagcttaaagattaagtattaatcattagatttaacactgggaaattaattggtaaactgataaaaggaataccaaagtgctacaatgaaagattgatgaagtgggctgaagagacaaaaaaaaataaaaagagtaaaaaattagtataagctacttttagtattccaaggcatgctcttgtaaagggaagttaacaaaacccaatcaatcaaacaagcagacaaaaacggggctgtagatgaagacagaattgaaattaagagagcttttattataggatgcagatacaatgacacatttatgtactgatggtaagatccaggagagagggaaaatttgaagatgctttagaaagaggaataaaacatcaaagccaaatttttataggtaaagcaaagggatgtagtgcacaaaaatgaaagtgagttggtagctaggagtttcatagcttatccgcatgaacaagcaagcaaggagttgggcatggtctcaggcgctgggtacatgtggtagtggatcctaaagttctcttgtgattgatccaattttcttagcaacatgggaagtgagatcattgggtgatgtaaagataactgtggtagttctgaatatttgtggaaaaaggaagtttaaaatagctttctaggagagtggaatgaaaaattcattgaaatgtgtaatttaatttcttttctttctttcgttctttttttttttgaggcagagtcttgctctgtcgcccaggctggagtgcagtggcgcgacctctgctcactgcaagttccacctcccaggttcccgccattctcctgcctcagcctcccgagtagctgggactacaggtgaccaccaccacgccaggctaattttttttttttgtatttttagtagagacggggtttcaccgtgttatccaggatggtcttgatctcctgacctcgtgatccacctgcctcggcctcccaaagtgctgggattacaggcgtgagccactgtgcccggccgtgtaatttaatttctaagtaataatgatgaccaactgttctgaaattaacaatcacacatttaaattgagagcaatcagcatgtggtgttttgctccaataacatttagttgcacatgcacatgaaaaaagtagtcaaagagttgaatattaaagtgagaaacttatcagatttctaaggtaatgcccaaagttttctgtgtgtatgcacatgtgcacgggcaggcatgtgttttggttggccttcatccactgtaaagctttatgttgtgaaaattttcatatattttataataagatattctggaagaaaaatgatggtagcttagttttgaattttcctgcttctcttctaaaatttatagggggatgtattagtgtcctaagactatcgtaacacggtatcacaacctgaatagtttaagcaacagaaattcactgtctcactgttcaggatgttagatgtctaagatcaggtctcagcagtgttgatttcttctgagggctctgagggaagaatctgtttcaggccttatgcctgggcttttagatggccatcttcaccgtgtactccttcacatggagatgtgtgtatgtgtgtgtgtgtgtgtgtttctccaagtttcccccttttcagtcatattaaatcagggcagaacttatgatctcattttaacttgattacctctgtaagaccctatctccaaataaggtcagtttctgaggtactgaggattatgactccaacatatgaatttcgccgatggcacacaattcaatccataacaggcaaagtgttgcattgctatgacacaaagagacaaggagggaagagaacttagaaatcacctaataaaatgcgctcccaggaagaagatggcatcatatagcgtaggaaccaacgtgctcaaagctgagctggaacaatgcatcagtcaaagagtagacaaacagaaatgcagggtgtggaagagggaggaggagaagacaaaaatttaaaaaaacagaactctaaaatgccaccatagtaagtgtattaaaataaaaatttaaagcctctaactatggtagaataaccagatgtgaacttgtctgtttgccttacaaaaataggaaacaggataaaacgtagaactaataaattgtcagatattttaccataagcagcacagaactatgaactctaagagaagagagaaaattgatgtaagttcggttattactctgactttctgtctgaagggattttcttgaacttgatgcagagaggtatccaaagcacagcatgacaatctccttgatatgaggagatagagatagaatttcagacaggtgggtttggctggaaaattgcagagcatgtattagaaagaagtatgatgtacagacaatggcttttatctgcttcaatctgttgcacaatgtaaaccacacatgccgtggatgaacatctagtaatagtgtatagaaaatcaaagataactatgttcacagatttctcattagaaagtatgccaggacggggcatggtggctcatgcctgaaatcccagcactttgggaggccaagacaggaggaatgcttgaccccaggtgtttgcgaccagcctggccaatatagtgagtcccagtctctaaaaaaaaaaaaaaaaaaaaaaaaaattatatatatagccaggcattgtggtttgcgcctgtagtcttggttgctcaggaggctgaggtgggaggatggcttgagtgtgagaggtcaagcagtgagctgtgttcatgatgctgcccttcagcctgtctgagattgagactctgtctcaaaaaaaaaaaaaaagaaagaaagaagagaaaagaaaagaaagcaaaaagaaagaaaaaaaaggaaactatgccaggcagtagacaataaaatatctttgaagtaggaaggaaaaataaccatcaatctagaattttatatagagtaaaatatctacaacaaatcaaggtaaaactgatacttttcccaacaacaaaagttagaggaatttatcactaactaaattgaactagatgaactattacagtttttaagcaaggaagctgttatttgatggaagctaaggtatacataatcaaacaatgattaccaatgtagaagtttcctttcattttctgaaaccgtttttgggacataacacgctgcttatactgtgtgtttatatggtacagtattatgttaaaataaactaataacataaggatatatattgtgaacacaaaacaaccataaaaatagttatagttgattaacagtatttaaaatgaaatacaaaaataataaaagactgacaaagagcaagtaaaaagcaacaacaaaaatagatggaataagtaataagcaaggacaaaaaaaaagaactattgttccttctttcttttcctttccttctgtgtcactttcagcataggtagttaaataatgcagtaaagtaacagagaaaataaattatgtaatagggttccatggttgtttgtgtttattggaaagtcactgcttgtttgcaattgaattgagttctggttttgaatggaaagtgtagcctcttggagttgtcaaccttgctcactcatttatagacataaaatgcttatcttgtactcagagtcttgctgaactttcaagcactgtgggtccacaagaattctgcgttcacgtggcatcacaaacgctgtatgtgaatagaacagtaagaaactgaacatgtatatcacagacatctctgctcacacttgtactcaagtgtcccatcatactgcacttttaaaacacagaggtaaaattatttaaaaatttaaggcagtaataagagagtgttaaatcaaaaacagggcacttctgagcatgaaatcttgtatgactgtacaaggtacagtgcatgaagctggccctacatgaacaaaacgaattatttccttctaagttctagaacaaagtagagatatccagtctaaccactgaaattcaatattgcatcaacattcttgccaatgcaatatgagaaagataaaaattaatacaacacatgccattagtaacaacgttaaaaacatgaacacaggaataaacttagcataatgtatgccatacctgtttactgaaatcttcaaaactttgctgagaaaaataaaacaagatcgaaatattaagattggtgtgaaagtaattgcagtttttacgattgaaagtaacgcaaaaactgcaattacttttgcactaacctaatatattgcaatgtataatgtgattacagattggaaggcttaatgttgttatgatagtatctctccccaaattgatctatatgttcaatgcatatttaaaaaacaattgtagcaaagttctttgtagaaattgttaagctaattctaaattttatatggaaatccaaaggacatattatatacaaaatgatttctaggaagaagaacaaaattagatgagcagcacctttttcttccaagactccctatatactccttttaggcaccagtcatagaggtagtatggctgaggtttacaactggatgtatagataatggaacagaatagaaaatccagaaacatgtcattttttatgtgcttaaatttttgaaagtatttccatggttattcaatgagaaaaattatagtcttttaaacaattttatcccagagggaatgtaagtatatttaaagacaaaaaagaaaccttaacttataacatgtctgcacatgctcatatacaagaggtatacaagaatagatggaagaggagtaagataaaaataccaattaaggcctttggactaacaagtgatggagtctttttttcctgccactaacacttttcgtataactttttcccctagaaattgtaactagccacaatttgaaaattagagattgacagtgaagtgtattagtcagttttcatactgctgataaagacatacccaagactgtgtactttataaaaaagaagaggtttaatggactcacagttccaggtggctagggaggactcacgaacatggagaaggctaaaggcacgtcttacatggtggcagacaagagagaatgtagacagacaagtctacattgtcttggcagacaagtgaaagaggaaataaatcttcagatctcgtgagacttattcactaacaggagaacagtataggagaaaccatctccatgattcaattatctgccatgagtccctcccacaacacgtgagaattatgggagctacaattcaagatgagatttgggtggggatgcagtcaaaccatattagtaagtctcccctgcattatggtgtactgttagtgtgtcactcatatcatatcagattccttaaacatttgtttgcataaagtccccatgtaattctattccccatagtaagtacctgcttctctagcaccatgtactatgtactatgcacaagtagccagaatcagatttgtctacagaattggagaactattatctccgaacttttgttctcctgctaacagctcttaaacattgagagatgtgtgtagaggcttaaatactccaagcgctttttctctaatcaggaatagactatttttgaaggattgagtaaaagctgttctttgcaggacttttctattatcatactcatttttggactcctctcatgtcctgtctcatttccccatgtggttatcaacttgtctagggataatgtaaaataacacatatcatgctggtctcaggacaaaactccatttattacagttggtgcaaaacagtcagattttatgcctatgatgctggtataattattataccatgatattgacccatttcactccaaaaccccttctagtttgtataataatttatacagtcatcattttataatgtgaaatagtcacaaccacaaccacattctacccaggagagagagtgtagaaaaatctatgataatttaggaaagaaagagtcagacaaagcaggtgctcttgaagtttaaaaacaaaacacattttgaacatgcaagaaactttgtgaatactgtttgcggaagcctccttgacaacattatgaggggatgaactccaggtggaaaggagtaattgctatttaacaaataaatgaaagaaaggctaaagttgacagaatagattatatattgtatatgctctgataatgtggaaataattcatctaacacaaaacggaacagatggctttgataagaagataaaaaataaagttagttttctgattacatcatcgtaattgctagatgtcaaagggtattatttaaagctacaaatcaaatagtaaaagatcaagtctatttaaggaaacaatgaaaaacactcgaaagttattgatatctattaaatgtgggtgatggtatcctggaaaggggaaaggaaaactatacaacttcatgttcatggtgtttaaaagaattgaagaaaaaggatattttacaaacgtaaaatcattcatgcaatttctagagcaaaattataaacttccctaaatattaaaaatacaccaaaagaaaaaataaaaatagacacccatactgaatatttcatacattgtgatggttagtttttgtgtgtcaacttgcctaggctatggtatccacttctgttaaacactaatctaaatacaccagtctggatgttgctgtctgatgaggttaacattgatgatcagtagaccttaaatgaaacagatatcctccataacgtgggtgagtctcacccaatctgttgaagatcttaagagtaaggattaaggaagaaatgggatcctcaaaatttgaatgggtcatctgaaaatactataaatgaagaaaagggaattgtactcttaaattttactgaattttagaagtgtccctttcaccatcatttagagattaaacctgcattgactgaggaaactgtaatgccccgtccccaggtagtttccttgcaagatgctgttaatcctcctcagcgcccccctcccacgactcttttattctagacttgtacctagactcaagttctagcagaaagctgaggtcgaagtgtaccccatgagtagatatgccagaagccaaaagaactacataattttttcaatttatacacacagaaaccctgggaatatgtgagaaataagtattaaggttgtgggatagtaggaacataacgttggatctggctaaatttattgatacaggccagctaagcagagatccttcatttaatagtgcagcatgaggggttagaaaaagatctaacagtttagttgattggttcaaacaaaagctggtctacactacaaatgaaattgaaaatttccgattatttattcctgacctagaactctttctttagcttatacagatcaggtaagaatttagcacactctccatctattctacccctagggacaccaagatcaattagccaattccataagttatctgtgagtcggactatttgtctaattgatctaggtcaagaaataggagtctaaattgaatcataaaagcagaaagcgcacctctatcaattcccagaatggagccaattactgatccagaactccttgaatgaaagggaggccaggttcccttgaggaaggacttcgctatactgccaaaaaaatttatatcattaatctttccccatcctttccaaaagggatgtatagccttttgtcagggtgactttgcattaggagaaaaacaagtaatcaatactgaacattggatccaaactgattccaggagacctaaaacattgctgcaatatatcagagtaggggcttataggtcagttgaataatggagttatagccaaggtgcattttgcagttggtccagtggatccctgatcccatcctatggttattttcccaactcagaatgtaggggtgctgatatccaccacatgcccatttaacttgcctatttgcttgtgcagaaaacagatggatcttggagaatgacaatgaattatcataagctttacccacgtggtaacaccaattacagctgttgtaccagatgtagttgcattgcttgagtgcattaacgcatgccctggtatccggtatgcagctattgatataatacgtgctttttccttttcacctgttagtagagtccactaaagctgtttacgttcagcttgcaaaaccacaatatgcctttattttcatacctcaggagaatattaactcttcagccctatgctaaagtttagtccacaccacaatacacatttattttcataccttaggagaatatcaactcttcagccctattctatagtttagtccacaccacagtacacctttattttcataccttaggagaatattaactcttcagccctatgctgtagtttagtccataccacaggacacctttattttcataccttatgagaatattaactcttcagccctatgctatagtttagtccacaccatagtacacctttattttcatatcttaggagaatattaactcttcagccctatgctatagtttagtctacaccacaatacacctttattttcataccttaggagaatattaactcttcagccatatgctatagtttagtccacaccacagtacacctttattttcataccttatgggaatattaactcttcagccctatgctgtagtttagttcacaccacagtacacctttattttcataccttaggagaatattaactcttcagccctatgctatagtttagtccacaccatagtacacctttattttcatatcttaggagaatattaactcttcagccctatgctatagtttagtccacaccacaatacacctttattttcataccttaggagaatatcaactcttcagccctatgctatagtttagtccacaccacagtacacctttatgacttggcgatgcgggctcttttttggttccatatgaactttaaagtagttttttccaattctgtgaagaaagtcattggtagcttgatggggatggcattgaatctataaattaccttgggcagtatggccattttcatgatattgattcttcctatccatgagcatggaaggcttttccatttgtttgtgtcctctcttatttccttgagcagtggtttgtagttctccttgaagaggttcttcaatcccttttaagttgtattcctaggtactttattttctttgtaacaattgtgaatgggagttcactcatgatttggctctctgtctgttatttgtgtataggaatgcttgtgattttgcacattgaagaagttgcttgtcagcttaagaaaaacctcctgagacgatggggttttctaaatatacaatcatgtaattgactttatttcttggtctttaaagatactggacacagccactgcatagaaattccaaaaaaaaagcgtatgcttctcctcatatatagcctatcaatttcaagtagcaaagaaaatggaagacatttttattcttcacttttctcagttgatcaggattaataactagaaaatgagtattctgcttcccttcacacatgatatgcatttgatgggataattagatcaacatcactcttactttctacagtcattgtgactgcatttgggaagagaaaatgtgccagtacaaaaccatattgcagtatataaatacaattgttttatttatttcctagttacagaactgtgaaacatattcactgtcaactaaatactaatgattatgacagtttttccctgacacaatattttcccagatacatatgatcgtttattgtcatttttaacattttcttagaacgattgttgattgtagcctgtattagtttgtactcacactgctgataaagacatacccaaggccaggtgcagtggctcatgcttgtaatcccagcactttggggggctgaagcaggtggatcatgaggtcaggcattcaagaccagcctggccaaaatggggaaaccctgtctctactaaaaacacaaaaattaatggggcttggtgtaatccagctactcagaaggctgtgatcccagctactcaggaggctgaggcaggagaatttgcttgaacctgggaggtggaggtttcagtgaactgagatcgcaccactgcactccagcctgggcaagagtgagatttcatgtcaaaaaaaaaaaaaaaaaaaaaaaaaaaaagacatgtctggaactaagaagaaaatgagatttcatggacttacagttccacatggctggagaggcctcataatcatggcagaagggaaggaggagcaaatcacgtcttacatggatggtggcaggcaaagagagagagcttatgcctggaaacttccatttttaaaacagtcagatctcatgagacttattcactagcacacgaacagcatgagaaagaccatgattcaattatctcccaacgggtccctcccaccatgtgggaattatgggggctacaagataagatttgggtggggacacaaagccaatccatatcattctgtctctggcccctcccaaatctcatgttttcacatttcaaaaccaatcatgcctttccaacagtctcccaaagtcttaactcatttcaggattaactgaaaagttcacagtccaaagtcctatctaagacaaggcaagtcccttctgcctatgagcctatcaaatcaaaagcaagttagttacttcttaggtgcaatgggggtacagccaatgggtaaatacagccattccaaatgagagaaattggccaaaacaaaggggctacaggttccatgcaagctcaaaatccagtgggacaggtcaaatcttaaagctccaaaatgatcttctttgactccatgtctcacatccaagtcatactgatgcaagaggtgagtttccttggtcttcagtagctccacccttaaggctttgcagggtacatcctctctcccagctgcttttaccagctggcatggagtgtctgtggctttttcaggcacacacacagtgcaagctgtcagtggatctaccattctgggatttggagggccctcttttcacagctccactagatggtaccccagtagggactctgtgtgggggctccaaccctacattttccttctgagctgccttagcaaaggttctccatgagagccctgcccctgcagtgaacttctgcctgggcatccaggcatttctatacatcctctgaaatctagcaggaggttcccaaacctcaattcttgacttctgtgtctgtgtatccacaggctcaacaccatgtggaagctaccaaggcttgaggcttgcaccctctgaagccacagctcaatctgtaccttggacccttttagtaacagctggaacagctggggcacagagcaccaagaccctagactgcacacagcatggagaccctggacctgccccacaaaactattttttcttcctaagcctctgggcctgtgatcggaggagcttctgtgaagacctctgacatgccctggagacattttccccactgtcttggagattaatatttggctcctcattatttatgcaaatttctgcaggcagcttcaatttttactcagaaatgatattttctcttctatcgcagtgtcaggctgtacattttctaacttttatgctctgtttcccttttaaaactgaatgcctttaccaccacccaagtcacatcttggatgctttgttgcttagaaatttcttgcaccagataccctaaattatctccctcaagttcaaagttccagaaatctctagggaaggggcaaaatgctgccagtctctttgctaaaacataacaagagtcgcctttgctccagttcccaacaagttcctcatctctatttgaaaccacctcagcctggatttctttgtctatcattatcagcattttggtcaaagccattcaacaagtctctagaaagttccaaactttcccacattttcctgtcttcttctgaaccctccaaactcttccaacctctgcctgttacccagctccaaagtcacttccacatgttcaggtatcttttcagtaacacctgactctactggtaccaatttactgtattagtccaatttcatgctgctgataaagacatatctgagactgggaggaaaaataggtttaagggacttacagttccacatggctggggaggagtcacaatcatggtggaaggcaaggaggagcaagtcacatcttacatggatggtgtcaggcaaagagagaaagcttgtgcagggaaattccctttttcaaaaccatcagatcttgtgagacttatacacaattatgcgaacactcccatgattcagttatctcccactgggtccctcccactgcacgtgggaattatggaagctacaataggagatttgggtgaggacccagagccaaaccatatcatagcctttctataaaatgtattttctgttgatgcaatttatctttaattaaaattaactttaatatgtattgtcaaaatcgtggtctctaaaatagttatatatatatgaagatacatgtatacaataataagagttttgttatatatccactccaccttaaaataaacacaaacagtacagttgaaacttcctgattacttatttccagttgaagaatatcataatttttaatttcatgcatacttatatatttttaaatgatataatgtggttttattttttaagttttgcaaatgaaattctatgcaaattctttggcaactttatttttctgaaaacctaattgtaattttcatacttggagactacattagttttcacagcagtttgatattatattatgtgaaaatgtcataatttctgtggattctcagttcataaaattctacattatatccagcactgagctgtcacaaacaatgttggtttacagagttttatatatgtatctcagaggattaaacaataactttttctatgatcaatctggaattgctaagacttagggctagaacacctttttcattaccagattttgtgggcttctgttcttctgagtacctggaccaatttttattatatcagcaataatagggagtattctgttactctaaattcttgacatcacaatattcttagtagtcattttaatgcattgtattttaaataattttcttgaaggtactatatttaaagccaaatagagaaatcaggtttaatatttatatatttgtatttatgtatgtgtggtacacaagatattataactcaagatcttgtatctcaagatgaggatgctaaacatttccgaagtcacagaaagacttgctgactcaccccacctctcagcccttaactgctacactgttgatgggaatgtaaattggtacagccattatggaaaacagtaggcaggttcttaaagatattaaaaatataactattatataatcctacttctagatatatactcaaaggaaatgaaataattatcttgatatttgcaatctcatgttcactactgcattattcacaatagcgaagatatgaaaacgtgttgacagatgaatgaataaagaaaatgccacacacacacacacacacacacacacacacagaggaatatttttcagacttaaaaaagaaaatcctgccatttgcaactctgtgtatgaacctgtagcatgttaggctaagtgaaatcagatgcagaaatacaaatactgcatgatctctctaattgtggaatctaaaaaagttgaactcacacaaacagagagtagaatgggggttgccagaggctgtggggtaggaaaaacagggagctgttgatcaaagggtacaaagtttcagttacttaggatgaataagttctggaaagctaatgtagaacatggctactatagttgataatatagtattgcatgcctcaagtttgataagggaaaagatattaagtgttctcactacatgtacacacacacaattgatgactttgtgaggtgataaatatgttaattagcttgactgtggtaatcacttcacagtgtatatgtacattaaaacatcacatttaataccttaaatatatacattttttgttaattatactgcaataaatctggggatggggagagatactagaggtatagaaggctgtgaaggtcatgaagttagaaataaatagattgacttgaaacatgcttttttttgcttttacttttaatttaatttaatttaattttttgagtcagggtctcactctatcacccaggctggagtgcaatggtgcaatcatggctcactacagccttaaaatcctgggctcaggtgatcctcccacctcagcctcccaagtaactgggagtacaggctcacagcatgcccagctaatttttttgtgcagtttttgtagagatggggtttccccatattgctcaggctggttgaaacatgtttagaaggtgatgtaacagatctttataactgacagatggtgagaagagaattactagataaaattgacataaacaaaagtagaactaataagtgaatttaatgaggtccagacaaaaagcaaacatttccaaaaaatcaaatgatatactatacactggaaataaataaattttaaaaaagagaagaactggaaatgtggaatacgtacttagaaaaactttaaaaagaagatgtgattaatctgtacactgaaatttataaaatattctttgagaaactaacttaaaatatataaataggcaacacataaataaaaaataaaagtataaaatagggtgtaaaaatagaaactaacttatgataaagtcattctccaataaatttaatgagaagaaaaatcttctgagcaaatactaataagacaattaaaaatatatgtaataattatacatatgcatatgtatctatgtatctgtgtgtatatgcattaaatataataaaaattttatatgtgtatatgaagatagtttctgactaacaatggttcaacttacagtttttcaacttgcaatggctttatcagggtgtaacctccattgtaagtcaaggaacacctgtatatacatatatatatggtgatgaaattaagctagattgtagaactaaatgaaaaagtaaaatatgttacccttctagaataaaatttagcaggatcccttcaacatcatgatgccttaaatttttcttagagagcaaactgaatgcagtaggcatgacaggaaaattgctaaactatactttactagacttaaaatttctcctcattgaaaacctaaattggtaagccacagactaaaagatattcacaaaatatacatctaaaaagaagacttatatccaaaatctctgaagaattttaactcaataataaaaatatttaaaaatccagtgaaaagtggataaaataatctaataaacatttgcaaaggacacaaataaatggcagagaataacaacaaaagcaaaacaaattaaaaaatgcagcatcactagttatcacaaaactgcaaattaaaaccataatgagataccattacacacctagtagaatggctaaaatttagaagtctaacagtatcagctgttagcacagattttaagcaatgagtctcttaaatattgcttgtagaaatgttaaatagtccagccatttcaaaaaagagtttttcaatttctttaaaagttatgcctaccttatgacccagcaattttactccaaaacaattaaatcctatgtttataaatgattgtataggcatgttaataacatctttattttttatagacaatagtggaaaaaattcaaaagtccatcagcagatctgttgaacaaattttggtttatttgtagaattgaaaacaactcggtaaaaacaaaataaataaataaataaatgattgctctgtcaacagtatggctcaataccaaaaacattatgttgaaggaaattagccaggcacaaaagagtacattctgtatgatcccatttggtgagattcaaagactgactaaatcaatctatgctagaaatcataaaagaggtggcctaagccaggagttggtaaaaaactagaaaatgccatgtgggaaatttctacagtgaaggaatttataccataatttgggtattgcttacaatagtatatacatttgtcaatagttaatatattttgcagttgagttctatgcatttttctgcattcaaattttatttaataaaaatgaacataaaaaacaaaactctttagaagagaaaatgagatttcagagagagtaaataaaacatgtggaattttttctagagcacaggtctctattctacaaattgaagtccatttcccttaatttgaaaaattgagaaataaggctaataatgttcttactttaaagcttagggaaaagtcaaaaatttttaagtaaatggaaataaagagttgatcttgaaagcttaactctgaaagctgaactctattgaaactgtatgtatttggtagaaactgcattttgagtactcataaccatttcgtgtttctctttcaaaatagtattcaaagattacatgagatattcaacattttattataaataggctttggattagatgtttttgcccaccttgaggctaatgtaaagctgaactctgaattaatgtaaattttgtttgctagaaaggtataacatattagtataaataagatggaagttcttttttttgtatttgtacgatatttttatttaatattttaatgcatttgttctgtttcccacttttatctacatgtctctcatttttaaataactttggtagtgtttggagaaaagtataaactttatcaatttaaaaaaaaacttgagacattttaaacctaaaaaatcttcacttgaattgtttgtatctaatatgtttatagaagaacaataaccttacttggtatcatctttttgcacttcaatattcaaaataatttgctgaaatattttaatcaaatgtctggcttttcaaaaaaaagtcataaactctttgtgggacaaattttaaaataatacttagcatatgaatacatagtttgtgatatatattaccctaaaattaaaatgtagttacactttaatatatggtttaattaattgattttactctatgctgtgtgaaagctaaaaaacacagaaatgtgttcaggatcctgaaaacaattctgcatcagaagaaaactaatgtttatcttctaccagacatttatgtttattcaataaatcatttaatctacttcaaattattttggacaataatgcctaactaatgtggctataaggttaagtcttgtattgactagtagtaagtcttgtcattaaacttaatccattatactgtaaatgtcactccctcaagctctacttctaatcaatatactctactatcttttccatcagatgagctacagtcagcccatggactagtattgactccattcctattaagagataataacatgcacatagaactttttccagtcttttaacacaaacagaagtctgtatgatacaattatttcataatctgaaattttcaagtttttaaaatataagggaggttctttttggtctttttaatataccaatccttttctatgaaggtatcagagcatcctctctatatatgtatacacacagagacagagcaagatagtctccaaattatgattcgacttatttcaactttgtcatgtgcaaaagcaataagctttcagtagaaactgtattttaaatacccatataacaattttgtgtttcactttcaatacagtattcaataaattgcatgagatattcaacattttattataaaataggctttgggtgagatgattttgcccaacttacttacattaatgtaagttttctgagcatgtttaaggtaggccaggctaaactatgatgttcagtaggttatgtatatcaaacacattttttccttatgataatttcagtttataatggattacgcaaaatggtagatccaccaacagcttgcaccatgcacctggaaaagacacaggtattcaatgccagctggtgaaagcacccaaaggggctgcaccctgcagagccacaggggcagagttgcccatggctgtaggagcccatccattgcatcggtgttatctggatgtgagacatgtagtcaaaggagattattttggagctttaagatttaatgactgccctgctgggtttggacttgcacagggtttgtagcccccttgtttggctgatttctcccccttggaatgggagtatttagacaatgcttgtactcctattatatcttggaagtaattaacttatttattttacaggctcatgggcagaaagtacttgctttgtctcagatgagatttttgggctgcagacttttcagttaatgctgaaatgagttaaggcattgggggactgttgaaaagggttgattgtattttgcaatgtgaaaataacataaaatttgagtggagctagagtgaaatgatatggtttggatttgtgtccccaaccacatcttatattgagctataatccccaatgttggaagagggtcctggttgaaggtgattggctcacggggcacacttcccctttgttgttctcatgatagtgagtgagttctaatgagatacggttgtttaaaagtgtgtgtcatctctcccctgcacttcctcctgctccagccgtataagatgtgactccttcctcttcaccttccatcatgattgtaagtttcctgaggtctcctcagcaatgcttcctgtacagcctgtggaactttgagtcaattaaacctcttttctttataaattacccagcctcagatagttctttatagcaatgtgagaatggactaatacaccatcccttgccaaaagccccctggggagcaaaatcaccactaagtgagaacccctggagcaagagaactgagaaatatgttttacagaaagattttataagtactatggaacagtgactattgtatgtggttttttttcttctctttccatacaggatatttattgcagttattttcttcttgttgccctactgcatgtgaggaattgaagaagcagatgagctgtctttatttcatatatttctgtatcaagagcttgatataatgactgaactaaactttgaaggtgctgggataaggatgattatagtttgtatgtgggagggaactgtgactgtgaggaagactcaagcaaatttcattaagaattccagcttattttgtctgctgcttatcttttgctaggtgactgcagtttttcctagtatggatgtgatatatatttcccactctttaaatttgagccctcaattgtcatagtccattttgtgctgctataacagaatacctgagacatggtaatatataatgaatggaaatttatttctcacaattttggaggctgttaaatttaagactgaagagtaggcatcttttggtggccttcttgtgatgtcatctcatgggtgaagttggaaaggcaagagacaaccctctcccaaaagccctttttgaaagatattaaacccatccatgaggacagaatccttgttgcttaatcatctcgaaataggcccacctgctaatactattacagtggaaattaaatttaaacataaattttggagggaacaaatatttaaaccataatatcaactttggtctgtttgagtcaacaaagtaaggccaaaaagacaatgtgccagtttcaatttatgttattaaggggcttttatattttctctttggcctttttatgcccttgatataagaagcacataagcttctactccagtagctccacaataaggataatagacatttgcagaagagtcaccccagctgagtcaccagagccaaaactaacttatatcagccaacttgtaaatgtattactgataacaatcatgatcagcaaaactgtcccaggaaaagaagtcagcttcagtcttccttctcacccacctcaaacaatctatactatttggaatcaaatttaaataaagttcaagggaagacaaaataatgttatctatgattatggatgatggggattgactgaaagagggaaaaaggaaactctttggggtgattgaagttttttctgtatcttgataggagttttggttacatggtggtttcttaaattcattaaacttcaatctcaagacttatttattttgtcttgatttatctttaatataataataaaaatatatgtaaaatatttttacatatttttattacttttttatatacagttagtcaaccacagaaaaggataatcagagataattattcagaaaggaacattgtttagtcttttaagcatctgctattcctttctcccttgaaaatgatgtgtagtgattagttttcatccgaacaggcattttctccttcttaaaaatgaaaacatgccctattttgaaggtgctgggataaggatgattatatttttatattacatatatgttacatataataaaaatagtatatgtaatgtttcaaacacacagaaagaatctggaaaaactgattaggataatattaagaaggaaatagaggttaaacatgttaacctgaaaaatcatagtaaattaaaacatgatggaaaaaattccaaatacatgtgtaatttcaatccatgtaaacgaattaaatatcaactacaaaaaaaagtctcatattttagaaaagtgcaatccacttcttattttcttccttttgttttcctgaacaattcagttctacagtacttagttgaagcaaagcatggaaagagtgtcttggcatgagatgtcagaagcaaagcatgataaagagggcatccacagtaggtgtcacagcctgagtgagatgaagagggcatcaagtgatgtctgccctcagccatgggatgtcagtaacaaaacaggacaaaagggctccaaaagtgtggggaagctcttcatgtactgcagaagccctgcaggttgaggaagatattaacctcagacatatggccatgtatgccatttgggagcctaagcaggatgatgtagggctatactgggggacctggataagatattagaacccagagtgcagagcggtgtataatacggctggaggtcttcacatgggttttcagaatctgagcagaatgagggctgcagcttatgtggatgttgaagcctagtcagaaagaagtgtagaagacataagcttaatcaagtgatcacattgaatgttatcagcaatggttgggagtaggggcgttgggagacagtatataatttcatagaaagcagaaaaatagaacattgcttaaattcctgctgaagatacataacttgaatctaattatatggaaacatgagacaaccccaaaattaaagtatgttttacaaaatctatgggaaaagctgtttcagactgatcaaggcatgattcataatttgatcattttactataaattatattatttaaacacttgtcaaagcttgaatatagtctgggatcaatggtggtaatgtattaatattaatttcttgattttgacagttgtgattatgtaggagcatttagaaagagacagcaatttagtgttcagagataataggaatcagatcagtaacaatcttaaatggctgagaaaaccaatgatttttgcactatacttgccacattataaatttgaatttgtgatttatgtatatatacacataaatattgtgtatgtatacctacaaagatataccagaatgtaacttatactgtaaacattaaaactcatagtaaaatattcatatatagtcatctctgagcatccatgtggaattcatttcaggatcccccatgaataccaaaatccatggatgctcaagtcccttatataaagtggtatattatttgtatataacctatgcacatcctcttgtatactgtaaattatttctagattacttataataccaaaacaatataaataccatgtaaatacttaccatactgtattgtttagggaataatgacaagaaaaagtctgtacgtgttcactattcgtgcaaccattattttttcaactatttttgatctgcagttggttgaatctatgaatgaagaacccatggatagagagggccaactgtataaagagtcaggaataagagaagaattctcattattatatcttcgattcatcatcgtatggaagtactatccaatttcctataagaagaaaacatgaaacaaaaaagaaaacagtgttcttcttttcatgcaataggcttatcttcatagaaaaggtataggagagtctgcaaaccactggaaatatttagaaaattcagcaagtttgctataaggttgacgcaaaagtaactgcagtttttaccattaagtcatggcaaaaccgcaattacttttttgccatcctaataatttattacattctatgtatttctgagtatattagcaatttccatacaaaacaagcaaagcattttaaaagaacattttaattttgattttaattaaaatattatattttaaaatttcaaatatattaaatacatttaagtatgtaaaatagaacacatttaaaatgtattgatatattaaatattatactattcgctgtaatggttaattttaagtgtcaacttggaagatgttttgaatgagtttaatatttaaatcagtgaacttcgattaaagcagattgctccccataatgtgagtgggcttcatccaatcagttaaagacttgaatagaacagaaaccagcctttctgagtaagagaacaatttttcagacgtcaactgcactgtcggctctcctgggtctccaggctgccagcccacactgtaaattttaaacttcctagcttccataattgcatgaggaaatttcttattgtaaatctctctccctctctctttttttctctgtctctcccattgcctatcggttctgtttctgtgaagaatcccgactcatatattctcacagtagcacaaaattataagatatgtaggaatatatcatattttaaaatatctttgtgaaaaaataataaaacatttaaaaaataacagtacacttgaataagtgatggatgttagaacatgtttatggatgaagttattatggtgaacatgaaaattcttcccaaattaatcaataaatttagtgcaattccaataaaaataccattatacaataatatttcatgaaatatgtgaggtcaataaacacatataaagattgtcagccaaaagaagctgacaatttcgaagtaaaatgtatggctagttttacctcataatattgaaggtttattgagggttattataaaatgtgagtaatttggtcaatttggtatttgtgtcaaattagacaaatagatcaataaattggaatgaacaacacagaaatagctcaggtgtaattggtacctgtatacatgttgcccgtatgaagaaggattcatctagattcatgtttcacatgatgcaacatagcattttgtctgaatttgaaatctaaatataaaaaataataccttaacacatctagatgttgatgaaaatgtattttgggtatagatgaatttcttaaataaggcaaaagcacaaactatgtgagattaataaatatgactatattatttttaaatggcacaggaagatgtaataaaattaaaaagtaagccaaaaactgggaaaatatatttttaaaacaaacaatgaagaaacaaaactaatgagaatacataaagaatgactatatattagtacggaaaaaaaaaaacagaataactagtaaaaataataaagtatcaatctaagcagtaatagggaagattcaagtcaaaacaatgaaactattttatagttgtcaaagggataaaaattaagaggtctgaaaacactgaatcctgtgtactggggaaactggaactcttagatactggtgttgggaatggaaattgttagtcaatttggagaacaatttgacatttactagtagagctgagaataatatacaatgacacactgattcaacttctaggttaacaggatatgtgcaaatgttgctaaggatgtttatgatagcattgattgtaataagtaaagaatagtgatatggtttggctgtgtgccaatccaaatctcatctggaattcccacgtgttatgtgggggacccggtgggaggtaattgaatcatgggaacagttctttcctgttttgttctcatgatagtttgtctcgggagatctgatggttttacaagggagagttgccctgctcaaattccttcttctgttgtctgccaccatgtgagacatgcttttcatctactgccataattgtgaggccttcccagccacgtggaactgtaagtctaataaacctctttcttttgtaaattgcccagtctcaggtatgtctttatcagcagcatgaaaatggattaataaagtcacccttgattttgccattattaaaataaagaatatatattagtttgctcataaaataaaatactatatgagagttaaatgtatttatatgtccaacataagtaacatttaaaaatgtagtattggatgatgtaagcaagtcttaaaatatatatattgtaatgataagatacaattggccattgaacaccacacgtttgaatagcacaggttcacttttttgcagactttattctgcttctgccacccctgagacagcaagaccaacccctccttttcccctctcctcagcctactcaacatgaacatgatgaggatgaagacctttatgataatctacttccacttaacaagtagtaaatattcttgttcctccttcccctccccgtcctcgtcttcttcctcctgcccctcttccccctgttcaccctcttctccgtcttccccctcttcccccttttccccttttccctctccctctccttctcctttttcttcttctattttttttttgacagagtctcactctgttgcccaggcttgagtgcagtggcacaatcatggctctctgcaacctccgcctcctgggttcaagcgatttttctgcctcagcctcccaaatagctgggattgcaggaacatcgtgctaatttttaaatttttagtagagactgggtttcaccatgttgcccaggctggtctcaaactcctgagctcaggcataccacctgcctcagcctcctaaagtgctgggattacaggcatgagccactgcacctggccatattttcgcttccttataattttcttaataatattttttctctagtttgttttattgtaacaatagagtatataaaacatataacatacaaaatatgtgttactcaattgttacgttttctgtaaggcttctggtcaacagtaggctgttagtagactgcacaggggttggtgtccccaacccccacattgttcaaggatcaactatacaatcgattttatcaataataaagccaaatattttacttctaattatacacatatagaataaaaacataaagttatgcacatttatttatttaatgctatttgacattttaatgtatttttctacaaaatgcctgctcatatgttctacccacattcctatcgtattttttcttattactacttgttattctaaggtattataaaacaatattttagaactatttttgtcaagtcaattgatttgtgctgttctttgttcattatttgtgcaaatattacttcaattatttttattattttatgcagttatatctattaatcttttcctgattcttttatatatattcatttaacatgttatagctttctatagtcacacatctaccatgttgaaatgaattgaaatcatgaaatcatgttaaatattttaacattagtttttatgaaaaatttgcctctgattttcagaaaatattatatagtgtccaacattggaagattttagtttctgtatttgtttttaaacaaaattggtgttatattttatcacatgactttttagcatctgtcaagattatggagaccatgggaaacaatgaatttagagaacaagaagattcctggtagcagcaataaaaaagacatgagagcacaaggtttccctagtttacttcaaatcaattgtatatgcttcaaaaataaagttattaggttattttcatccttactagaatgaggaaggtatacagaaaagttatttaacaactggtataatgcaactaattcgaattaaagttagggcagagtcctgaaggtgccctgatggaccagggattaatttttcagttcatggactgtgtacaaatctcagaaattagagattcagcaggggcatcttgggtgggaagggcaaccaggatgcaagaactaaccaatgtatctttaaacagacaaaaaatattactaaattgatattaatattgataataatatcagtatgtcgattgaatatcaacacactataaatactagttaaaataatatttgtcattattggcctttcaagttattaattattcaaattgcatattctttcaatgatgcaatgccatttaattttgaatgtatcatcacataaattttcttcctagatatctaaaataattttaaatttattgtgtcattgaaattttgttatatagtcacacatgcgcaggttgagcgcaattttatacttattaatttttatgctttattaattacatttaataaatatattgaatactaaaaatatttctggcactaaaatattagtacaaacttcaaaggttatcaatttaagatcagtacagtcacaaatggggtatttaacaatgggtggggacctatatgattgttagagtaactggaagatgctactgacatttattgagtgtgggctaggaatggtcaacctcttagaatacatagtccatacaaagagttattgtgtaaatccaaatacaaagaatgttctcattgatatatactgatccatttttttaggggctatgcagattcaaatgaaatgcaacacaatgaaaatatgtagttcattgtcaatgaatgcatggtatttgcatgtgggtttgtatattgttaaatttgagcaattaatctgtggaattatatttatgatctctgaagatggctgtatgtagtatttatttcttaaattaccaataatttaaataagtatataacacagcttaataaaaaatatgtgtatatatggatgtgtgtatctatcgctctctatatatgaaacatacagagttttatatttcattctatcattgtaactatagtaagtgaaggcaaccatactgccttggttttcccattgcatgctactatttgttttgatcaaattcttgcctaaatcagaatgctaaagcacttcagagctcaatccttcaacctcttttgtatttacatccacttcctaattgaaagttcaggttccttgactttaaatgtcatttatgaagttgtaactcttacatttctatctccaccccgatcgttgccctgaaattcagattgtaaattcaactgtcagttgcaatacacattttcacacaaaaaaacgatgtctgcttccaaatcttgataaagacctcatgagaaaccctgagacaaccaacttgaatgtagaatggttatttcgaactaaacaatttgtaagccaagccttttactttcctcctcagacaccctccttgtccagtttttcttctgcaatctcaataaatgctactgttcttttaagttcaatgaccaaaaatctctgccacaaatatcaaaattgtaagcaagtgcttcaagttctatttagcatgactaccatcagttagaaaaagcagaattctatttatgagagactaccataaaaggcacatattgaccaatcttatttatgagcatttatttatgagcacttattgtattgtatatttcaaaatatctagaagagaggatttcaaatgttatcatcacaatgacataataaatgattgaaatgatggagaagctaaatgctctgatttgatcatttcaagaatgtattacatgtatccaaacatcacacagtaataaataaatatgtataattattacatgtcaattagaaataaaatgctacttaaaaaataaaaaaattaaatctaaagcaaaatattgacaagaagaatctaacaatcattctcaaaattatttggccaagtagagatattcttcagtaatatgaagctgattttataccaacatatttatgaatataatatgtaagtaaagtagaaaatcaaatgattatattcattgatgctaaaagacatttaataaaatatagaagccactttcaaaaaaattataaatagaagaaaactttaaatgaatacacaataatttggtaaaaccaatagcagtgtttattctaaatggtaaacctcaaaatttatttttataaattcctaaagaaagaatctttttgtctgatgtcaacttaactattctacacctttgaggtcaaaggaaatatagagaaaaataaaatacttttcaatattttgtaatacaaaaaggaataaaattgtctcatgttgtcatgtaattacacacctacatggaagaaattctagtaaatgtctacaacacggaagagaccctagtaaattaataatgaaattattaataatgaataatgaaatgtatgctttcataaaaggcagaaaaaatcaataacttatctccctaccaacctgaaacacttttaattggaaatgggaaagtataccattcacaaaaatatagacactgggaaatgtttcaaaagataaaagactcataggatgtcctgaatacatagaaaggtattcccatgttcttggataggaagagttcgagtaatgaaaatgccaattctttaacaaataaatatataagtgaactaaaattccaataagaatttgagtttataggataaaatgacctaaagttagatataaaaaataaatattcaatagttaagagagttttgaaaaataacaaattgagaaatcattagcatatattagaatgcactacaaagttactaggatcagcacagcatgcttaaataatataattagataagtaaataactacaagggagtcatgaactcaggaaaatatatattttcctgagtataaataagaaaataggtgcttctattctgtttagaaaagagtctatttaatcaattgtgatggcataattgaccaaatatgtagaaaaaaataaatctgagccgttaagttgcagtataagcacaaataaactctatatgcattacagttgctgattactgggatatcatcaattcaggcctcacacccatggacaatgaatgatgtatttcctaattattgcaaacgtcttttttcctaatttctatactttgaaggtgatatggtttggctgtgtccccacccaaatcttatcttgaattgtaatccccatgtttctagggaaagacccagcgggagttactgaataatggggttggtttctctcatgctgttctcatgatagtgaatgagttcttatgagatctgatggtttcataagcatatggcatttcccctgctggcactcattctctctcctgccaccctgtgaagagttgccttctgccatgattgtaagtttcctggggcctccccacacctgcagaactaggcatcaattaaatttctttttttataaattacctagtctcaaatatttcttcataatagcatgagaatggactaatacagtaaattggtaccaggagtgaggtgtgtatgctgctgtaaagatacccaaaagtgtggaattgactttggaactgaattacaggcagaagttggaacaatttggaggaatcagaagaagacgacagaaaaatgtgcaaaagtttggaacttcctagagacttgaagggttcagaagattgaaagatgtggggaaagtttcaaacttcctagggacttgttgaatggctttgaacaaaatgcttagaataatatggacaatgaattccaggctgaggtggtctcagatggaggtgagggacttgttgggaacttgaatagaagtgattcttgctatgctttagcaaagagactagtggcatactgcaactctcctagagatctgtggaactgtgaacttgagaaagatgatttatggtatctggtggacagaaatttctaagtggcaaagtgttcaagaggaagcagagcataaaagtttggaaaatttgcaggctggtgatgtgatagaaaagaaaatctcattttctggggagaaattcaagccagctacagaaatgtgcataagcaatgaggagcccaacgttattcaccaagataatggggaaaatgtctccaagacatttcagagaccttcactgcagcccctcacatcacaggcccagaggcctgtggtttcatggactggccagggccccctgctctgtgcagccttgggacatgatggcctgaatcccagctgcttcagcgctagctgtagctaaaaggggtcaacgtacagcttgagccattgcttcagagggtgccagctccaagccttgatggcttccaagtggtgttgagcctatgggtagacagaagtcaacaactgaggtttgggaacctccgcctagatttcagaggatgtatggaaatgcctggagattcagacagaagtttgctgcaggggtggggacttcatggagaacctctgctagggaagtgcagaaaagaaatgtagggttggtgctcccacacagagtcccctctggggcactgcctaatggagttgtgagaagacagccaccattctccagaccccaaaatggtagatccaccaacagcttgcaccgtgtgcctggaaaaatctgacagtcaatgtcagcctatgaaagcagccaggagctgggctataccctgcagagccacaggggcagagatgcccaagaccacgggaacctaactgtttcatcagcgtgacctggatgtaagatatggaatcaaaagagatcattttggagctttaagatttgactgccccactggatttcagactttcatagggcctgcagccccttggttttggccaatttgtctctcctttggaacagctgtatttacccaatgcctgtacccccactgtatctaggaagtaactaacttgcttttgattttacaggcttataggcagaagggacttgccttgtctcagatgagactttggaccgtgttcttttgggttaatgctgaaatgagttaagactttccatgactgttgagaaggcatgattggttttgaaatttgaggacatgagatttgggaggtgccagaggcagaatgatgtggtttggttgtgtcctaacccaaatcccatcttgaattttaatccccatgtgtcattggagggacctggtaggaggtaattgaatcatgggagtagtttccccagtgctgttctcgtgatagtgagtgagttatcatgagatctgatggttttataagcatccagcatttcccctgcaggccctcattctctctcccaccaccctctgaagaggtgccttctgccttagttgtaagtttcttgaggcctccccagccatgctaaactgtgagtcaattaagcctctttcctttctaaattacccagtcacaagtatgtcttcatagcagcatgagaatggactaatacagagggattgatcacaaatatgtttgctgttcccctaaaatgatctgaggaggatttttcttgcctttagtgactccctgctatttgaggagcttagtttcatttccaagtactagagaccaggctcttcctcacacactttcatctgcatactccaggttttaagcataaacttgtatctgcatctctgcttcctttatgactctttagacctcaagtcttcttgaattttatcattttgaatttattctttgtttcctgaaccagggtgttttctttgttaggtatacctttgatttaatgttaaaatgtgttcacaggggctggatgcagtagctcatgcctgtaatcccagcactttgtgacgccaaggcaggaggatcacaaggtcaagagatcaagacattcctgcccaacatggtgaaaccccttctctactaaaagtacaaaaaaattagctgtgtgaggtggcatgcacctgtagtcccaactactcgggaggctgaggcaggagaatcgcttgaacctgggaggtggagattgcagtgaactgagatcatgccgctgcactccagcctggtgacagagtgagactctgtctctaaaaaaaatttgtgtaagggtatgtgtctgtgtctgaagcaagtgggagcatcctgcatcgttgatacaaaatcaagttatgtgttaaacagttttttatatggtttctataatttctgtcatttgaaacaggaaaggaggggttgcaattatgttctgagactgtcaatttcaaaatattctattagtttttagaaatttatttgcatagaggtagtaactgttaattgtattaaaagatgatttgaaagcttaaaatggaaaacatatccactgattatttctgagaattataaagatattatccttaggttaggctatttttgtgagaaaacaactcactcacctcagctcatggtattcttgtattttctggaaacagtagttgaaaattgctgcatagcaatttatacttaataaactacatatatgtgtgtgtgtgtgtatatatgtatatatatacacagatatatatatgtatttttttaacaatctgttgacatcggtattattccttcagtttcctactgtaatagaatgtggccaaaaagaaatggcttatcacagattgtcttcccccaaagtagtaaagaaatcaatcactcagacttgggaggttgcttctatgatcttttcactaatacttactacttcccagcataaattacactttaggcttctttcttccttcttttctttttctttcttgcttctttttttctttccttcctttgtttatattttctttccttttttaaaaaacaaaattcttaatttgggtaactttccttttaaggaagttgaatcactttctaaagcaaacagaacaccagtagattactaagctgactgtaaattaaaatcaagctttacttccctgagacccaactaggtattaatgagtacaaagtaggttcattcaatagaacattgaaaagggaccatattttcactcctgctctgtcaatatatatataacacaaaaatattatctgccagtaagaatggccttagtctatttatattctgtttaataagcaccctttcagcattgtacagacaaaagctgtatctttcttcttgatttctgctcttcaaaatagggcatgctttaatttttaagaaggagaaaatgcctgttcggatgaaaactaatcactacacatcattttcaagggagaaaggaacagcagatgcttaaaagactaaacagtgttcctttccaaataaatatctctgattattctttcctgtggttgactaactgtataaaacatgattaggtctaacgctctattgatgtatcacagtcttaggcagagttaacagtatacttagcttgggcctgcctttctttcttttcccattttcctagctgcagtgtggcatagcccttagtcgatacagcaactccctcctaagcaagcattaaattgaacacatgaatggcagcattttaaaggagatctgataacccagacatgcttgcggcttttaaagaggccacatcagataaaaagaactactggacacttgagagctgacatattcttctaaaaaagaaaagatcttgagaaatcaattgggccatagagaatattctccaaaagatcaaatagggcaaaagaatgtttctatttctctagagcagcatacaatatttagagaaaatgctctttcaaatagtcaaatgaatttattcatacagtatttttatataaagagttgagcctaatacttctgagaatgactttaaaatctcccacattttgtcaacaatcttagactttaatcctaaaaaaaaatcttgaaaatgttttccatcatcacagatgcccaaaggaaaaatacactcttcaaaaagtgagttcataaatcatttagtttttcaatacttaaagaatgaaatagaatttcctgaaggccttctgtgtatgtatgggtgtgtatgtttgtgtgtgtatgtgtgtgtgtgggatagagagagagagaaaaaaaaattagcagaatactgtatatccaaagttcagcataatattaatgataatctaatttcagaagaaaatttaaaaaatatttctaatgatactgatctttgaaatctagaactttatgtaaaaaaccactccaaattggaaacatatttgtcattttctaaaggaactatgcctatcaatcaatggactacatctggttagccatttgtgtgattcttttcatcattacagacctacattgattttactaaacaactgaatggaataagcctttaaaaaataaaaacaagaacagaagaaggaaggaaggaaggaagaaactaagaaagaaaggaagaaagaacctaacctaagaaataagcaacatgtaccctcagacgtttggctcattgccaagctaaacaaaccttcacaatttgcagaaagtaaacttaaatatcgttgttgtcaacttaaaatcagtgagttgggtgaaaacaatcaagtaccaaagtcagaagtgtacaacgactgtcacattagtgccatgagacatggcctcatttggtgaaactgtgtgtattttttaaagcagctgtaggcaagcaaatacttcatgacgttaaatcaaccacataaggaaactgaaataagtaattactctagggaagtgagcaattaacaactgagcacacatacggatttctttgaatgtaagtcaataagactttatgtttccagagaagaattctctcccaattatatttctccctaacagtaagaacagtagggtgggaagagtcaataatacatgctcaataaacatgatttgaatgaataaattggtatttgttaaagaactataaaaactacagtaataatggagaaaattttctcatactcctttagatatttttgattattttttcttcccccatgcacttgctaatagtttctctcatgtcttagtccagtcaggttggtataacaaattaccatagactgagtggcatataaacaataagaatttatttctcgtagttctggaaactggaagtctcagatgagagtgccattatggtttaattctaaaggctctcttctgagttgcagatggcaacttcttgttgtgccctctcatggtgactggggcaaggcagctctatggcatgtctttcataagggcactaaaatcctgttcaaaaaggctctgctcttatgacctaatcactcaccaaagggcccacctcctaatagcatcaccttcagggttaagactttaacgtatgaattttttaggaacataaacattcagtctattgttccctgcatccagccctcctagtactctgtgaacctcttccttttttgctttcttcatcctgtctctggcctgctgttagtaaaagactgtctataccacttacgtttccttaagcacctattcagtatgtcacattataccaactccccccctataaaccacataatacagagaattctgaaacccaattaccaactcaaagatgtattatggaattctgccaatctttcttcttgttgactttctggtgggttatttatctggaattgatttttcatctagataaatcactcatgtgtgtcattgtaactcttggactaaattattgcctctttaatatgttgtttgttgggcctaacttctggactatatttcttagtttagaaatatagagaaataagagactggggtttatcccacagccattaggaagaggagtcaatacttgcttcctctacagtcacttaagcggacctaacctctgccagccaggagacctgtaatccatattttagttattataaattaattggtatcataattttgttcagaagtaaaagatcatcatttgtcttccataaaaagatgaccaatactcaggaaatattgattgaaagtattcactgataagtatataaaaagcaagggttaaaacatacttgatatggtcaatattttatttgtactttgcttaaaaaacaaagatgagttgaatggaaagaaacaaaagattgtacacaatgattatagtttaaatatgatgctaattaatgatgctattcctttttcatttccttttcatgaagattattccaaaattactttaacaatcagcagatatggtgagttatttatatgaatgattatcataaaaaggaaaccaaagagaaggaaaagctcagagaaaaatattgatgaaaacattaggtacatcaaaaatcactctgggtatattgatctgattcattcttctatgcttgacagagaacattcaatactcagaattatccatctagcattttgacattgccctttggagagtaattatcagtactaatttatgtaatttttttagtccggcagaaggtttcagaactcacatatgcctgtgtattttaactttataccttgaatgtactctatttacaatttaggcaatataatatgactagcataatattacatgaaattatattttcaaaatggaaattatttctcagggattttttttaaaagaaggtttcaaaaagtattttcagttttaaagaaaaccaatgtttttccttttttctgagatagtacgtgtatagctatcacttgcaaggaataaaaccacagaaattaataggacatgtgcctgaaaaaaaatatttggaagatatagggcagtgccatcaaatatacataaaatgttatccacatatggaattttaagtcatctagcagtcacatcaaaaataagaagaacccggtaaaattatttttataattgcggtaccataaaaacgtatttggtcttctcttctggtttctggcacagcactccactggaagctgagtctccagaaagaccaaccctttgttagaagtttggaactttcagctgcaccccctcaacctcagagaagggagaaaggctggattgagttcaagcaccagtggccaatgatttaatcaatcatgtctacatagtggaagctcataaaaatccctaaatgatggggattggagagtttccaggtgggtgaacacactgaggtactgggaaggcagcatggaaactcggcacctcttcacctcccactacctcgccctacacatttcttccatttggctgttcctgagttgtatcccttataataaaccattaatagtaagtaaaatcatttcctgagttccgtgagtcattctagcaaattatcaaacatgaagggttggggggaggttgtgggaacccctgatttgtagtaaagttagagagaagtgtgggtaacctggagaccaatatttgaaattggagtcttgccattgactcttgatagacctccaggtaacccacaattctctctaactttgctacatactgggctgtgaaatcaaaccctaactgcctggaggctgctttcattctggctaggtagcgtcagaggtaaattgaattgtagggcacccagttggggtaccatcatttttcttctgaatgctgagtctttcctttgcttctctgtggagatcaatccattctagcgtggcatgaaaggcctattgaatctctatgtaaactaaagcccaggacaggtctaggttttgaaaagggatggaaacctttttgagttatttaatacttatgtccaaccccactaaacaaaatacacagcatgtgttacacaaatcaaatgtgtaacacccatatttctagatattcactcttgaattttcagaatgtcagcaggacactgcccatgcctgaccatcctcaaatattatgtaactctggttagtgcgtcagcattagtgaatgtaaggagggagtgacaaactggaaaagggataaaataagggggagatccaatatcagttaagtacatctaagaagtgttatgtcaaaatcaacattgagaaggccattccgaatttggttgtgttcagtttcataattacataatttacttgtcaaatatccatgaagtcctgtgatttgctttaaagacagataccctgtgaaggctgacacgttagactttagatatcagtcacttagcagtcatttcataccagggaatcatttaatttgcctggtctttagagaataatagaataatacctctcttatacgactgctttcaattaatctcacacacacacacacacaatatgaaaatactttgaacactgcatgacacctgctaatgatttattacatgacaacagcacatttctgacctagcgaatacgaagatggcactattagcaaaccaaagtctctctttgcttaatataattttaacaaatatatttataggaaaaatttagctactgataaacgttcttaacaattcttctgacggtttgtggtaaagtaattatgaacttgattaaatcaaacttattcttcatttaatatgataatttttttcttaaaaaattattcaaacactctgtttggtatttgggatgttctgtttcttcatgttgccaaactagatagacaggaaaaaataggataaattaatcattactagaaataatttgaaagactgtttaactttatcttgacatcaatatggtatagaaacaaatttgaattagtttgacagtgcacataaataaatcctgtaatatgtaatttctggatcatagtgaaatccaattctcaatttaattttaacctaatgctatgctcgtagatattaaaatgggcattttcataactttttatttacaaagaagagtaaagtttaaattatatcggtaatattcacatagtatagagaaatagagctagcatctatgttttatgtaaaattccagctcctttcagttgcgattttttttggggtttcaatgaaattatgtatttaccaacataaacagattttaaaatttactattttcaattagctactgcttgtgaatgtgtgcaaaaattaaagtctttataatcactagactgggatctttatgccatcagttttctttaaattagtataaggcacagtcatgtgggtgaaatatgttaaatttgagccaggtgtgttgaagacaaagtccttgtttaactcttttacttaatacataagtgagaaaggtaacttttaaactgcccttgcaaaaattataatagtaagaaaattatggcagtgaaagagatcagacctaaccaactccatcttttctttaaccttcaaactacccttagctgttcctgagcatggaccaagttaagtttggaagaaatttagtttatagtttaagagataatagctctttcaaaaactaaaccacctttgtaaaaccaatgaaaagaaaccaggttgggagaatgagaggggcctaaattctgctaagatgtaggcatagttaagtaattaccagccattattccagaggtcacaagatttgcaacttccccaattactcctgtaacaaacattcctattgtagaacctaaaattggctgtttgagatgtcttcttaggcttttgcatttctgaagaccgatggccacacctagaccaaagactcctttgtggcccccacccagaagcagattcagtgcactaggactattttccacaaccctacttttgcatccccaaccagtcagcctccattacctaggctcctgcccaccaaactatccttgaaaagctctagcctccaaattttttgggaggtggatttcagtagtaataaaactgtggtctctagtttagctggctctactcatattaatataactctttccctttgcaattccccatcttgataaattggctctgtctgggcagtgggcaaaaagaacccattaggtggttatacttttagctcattaagagtagaaatccactctgaatgtgtactcagtaagatatcctgcatcaagtaacttgcccctccaaatgggaggactacagtgtctcctgctcagtgcagtgatgcttttctttaagtgcatatagaaatgttcatattttacctgagtgggctgacagttcaacacattgccatcttgtgttgacaatgcatacttcaatttggtattagagacacatttccttatacttctgggtttaaattatgcagtttttctcagtgccactgttttcttgtgggtataacaataatacttactttacaaggctggtgcaaatattaattgaacaaatagatgcctagtaaacggaattgtgaaaggcacattgtaaggattctataattgcttttattattatcaatattattattattaatctatccatgaaaattatccagcttattactaccagaaaggaaatgttgaaagacaataaagttaaatgcaaactgcataaaatgactttataatattaagagatacagacttgtatttgaatatattagcaaaaacaatggaattataaatatgtattttccattttttctagcaaacaataatttatttatatgaaaaatgtatagttagaaaagccagtgtggttcataattgctgatgtacaaattccttgatttaaagcaaaaatccactttaatatggcagcatatattaccatattcttatttgaaaaatgttatttcaactcctccaaagatacagtgacagaaagtgttattttaatttatttgccatatgcaatcctgtttcctctccttaaattaagaaaaatgcatagagtgtttcccatcaggtagctcctatttggatgaaaactcttaaaactcaatgaagagcactctgttttcagtaactcctgttaaaaacacaaacacaggttacggccaggtggaagtgaaaattttgactttttttctggatagaaatgtggaattacaaatatgtcacctctgaactaggtacatatccagctaatctagcacagctagataatcacaactctaccggagtactgtgtagattttgcagtgtggggaacaaagtctatgcttgctggtaggaagatcacctgaagagtgaagaaagaaggggctgatttgctcagactgtaatttgctccctagtaatcagggaagtcatacctcatcccatagggaagaatgacaagtaacagaaaaagggtaaggatatggctctttggagggttctggacagaaaagttgaagcagagaaaaattacatattcagatagaaaaacaaatttattgaacaacgatccaatagattattaaaataggtaccatttttgtttaggtttatgttttgtgaaattgatttatgttttgtgaaatttatgatttcacaattttttgttttgtgaaattgtacataatttatgttctgtgaaattgttgatctatgttttgtgaaattgtacataatctattatttctttcaatagatattttaatttaaagtatgaaataattaacactgctagtcattaatttttaccctgaaacacaatcttgcctcaaattttcagaacattattttttatttagtatatcacttcataaatagccacaaccctcaaagatgtaaattaaggacagcaaggtttaaaatcaataattcctttaagcctttacaatattttttaaagtagtgccaggaaataagacatgctggctttcactttcagtaacctgaaaataatagcataaattatgtaagtaacctcttatttaacagagttgtatcatattttttactctaagttccttgtttagtatgacaaagctctactttctagatcagtggttctcaaagacaatgattttctcccaggaagatttcttaggaggcatttggcaatgtctggagagagtttgggttgtgataaaacaaggaagacactactattggcaactagtgaacagagatcacagatgctgctgaacatcctaaaattcaagtggcagcttttacaacatagaagtggccaaaaatgtcagttgtgctgaggttcagaatctttgttttagatgcatgttatttgacttaagatttgtattaatatcaaagggacaactttggggcttgaagatggctgactagagggacctgacacttgccttctccacaaagaaggaccaaaacagcaaataaataatcacacgttgaatagagtgtctgagagagaacagtagaattcagcagagaaatcacaggaaagctctgagatacacacagaagagagaagcaaagcagttcactggtcaggattggctgggagcctcaggagagagaaacttcccagcgtaggaaaaaggtaaatgagagatcacctgcggtcctcatttccaccatgaacgtctgctatctgcaagcggagaagccccttggcccttgcaggccctgagaccagtataggaagccgtatagagtccatatgattgtattgttccaaagtgggagttcatgctggatcatatcaacctccttgccaccccatgctagactcaagcagctacaggagggtaccattttgagagcccatcagctaccagactatatccttccctgggacccaatagccactgtttttccccttcccttgagacccctgctgacatctccctagatccactcagagatctgcagtatcaggacacagactgaacctgtcactgttgccaggtccccaggactctagacttcgcagtgtcctacagcctgggaaaagtgcatgcatcacaccagggagtctgcccgtggaacaagacaaaggaagccaaagcatttgatgcccagagtctgagagaccctgcccagggccactgtcacagacactaacctcccactccaagcagcaggaccactgctcatctgcatgtgccttcagggggcccaggggccaacctgcccagaaaccatctggggtttaagaatattccaattcttgcgatagtttgctgagaatgatggtttccagctttatccatgcaaactgtcgcaaggacaaaaaaccaaacaccacatgttctcactcataggtgggaattgaacaatgagaacacatggacacaggaaggggaacatcacacaccggggcctgttgtggggtggggggaggggggagggatagcattaggagatatacctaatgttaaatgacgagttaatgggtgcagcacaccaacatggcacatgtatacatatgtaactaacctgcacattgtgcacatgtactctaaaatttaaagtataataaagaaacaaataaaaaataaaaaattgaaaaaaaaaagaaaaaagaatattccaatcttgcctagtgaccctagcaccgtgcatgccatttgggagcctgaggacaactcaacctaccaccattggcacccttgcatgctgtctgggggcgtgaaaattcaagtatactgtcctgctgctgccagtgccagctcacacaatcaggagactggaggactggcctgccccaccctcaccttcctgcagcagtgcacatgaataccaccggggggcctgaaaacagttctgccctgcccattgccatctccattagcacccaagcatgctgtctaggggccgaaaaatgaatcttcataaatttaaataaattaaaatcatatcaaacatcttcccacatcataatagagtaaaattagaaatcaataccaagtagaactttggaaactgtacaaatacatggaaattaagcaacatgctcctgagtgaccactggttcaataaagaaattaaaaataaattaaaacattttttgaaacaaatgaaaatagaaacacaaataccaaaacctagggggtagagcaaaggcagtggtaagatggaagtttgtagttataaatacctacctcacaaagagtagaaatatttcaaataaacaacctgattacttgccacctcaaaaagctaggaaaacaaacaaaaaaagcaaataatcaaactcaaaattattaattttttaaatttaaatttttatttaatttagttattttttagagactgggtctccctctgttgtccaggctggccctcaagtgatcctcccgttttggcctcccaaagcactgtgattataggtgacagccactgcactcaacccaaactcaaaattagtagaagaaaataaatcataaaaatcagagcagaactggataaaatagagactaaaaatttacaaagtatccatgaaacaaaaagtgtttttttgaaaaaagataaacaagatcaataaactgatagtttgactaaccaagaaaaagagagagaagacataaaaaagtaaaagtaaaaattaaaaaggagacattaaactggtatcagaaaaataaaaaatatcattaaaaactgttatgaagcactatatgctaacaaattggaaaatctaaagaaaatggataaattcctagatacacataacctaccaggattgcataaagaaattaaaaatttgaacagatcaataagaagtaacaaaattgaagcagtaataagtctcccatcaaagaaaagcccagaacctgatggcttaactgctgaattttatcaaatttatcaagaagaactaaaatgaatttctctgaaactattcaaaaaaaatttaagatgagccctctatgaggccagcattgccctgataccaaatccaggaaaggcataacaaaaatagaaaaccacaggccaatactcctgaataacatagatgcaaaattcctcaacaaaatactagtaaaacaaatcaaacaacatagcaaaatacaccatgatctagtgggatttatcaaagggacacaagtatggttccacatatgtaaatggataaatgtaatacatcacatgaacagaatgaaggacaaaaattgtaatatcacctcaataaatacataaaaagcacctgataaaattccgaatcctttatgataaaaactctcaagatattaggcacggaaggaacatagctcaacatagtaaagaaaatatattgctgacccatagctaacatcatattggatggggaaaagctgaaatcttttcccctaaaaactagagaaagataagaatgcccactttcaccgctgttattcaacatagtattagaagttctggccagaacaggcaggcaaggggaagaaataaaaggaattcaaactggaaaaaagaagtcaaaatgtatctctttgcagataagatgatcttatatatttaaaaacaaacaaaacactaagactccaccaaaaaaaaaaaaaccatttagaactaataaatgaattcagtaaagttgcaggatacaatttcaatatataaaaatcactaacatttccacacaccaaaaacaaattagctgaaaaagaaatttaaaaggcaatcccttttataaaagctagaaaaaaaaatatctagaaataaatttaaccaagaagtcaaaagacctctgcaaggaaaactacaaaacactgatgaaagaaattgaggaggatacagataaatagcaaaaatcttctgctcatggaatggaagcattaatattgcttaaatgtctataccacccaaagtgatctacagattcaatgtaatcttgatcaaagtaacaatggcattctttgcagaaatagaaacaaaaattctaaaatttgtatgacactataaaagacctgaataaccaaagcaatctgaaccaaagaaccaaactggaagccatcacactacttgacttcaaaatatactccaaagctgtaataaccaaaacatcaaggtactaacatgaaaacaaacaagaccaatggtacagaatacaaaacccagaaataaatccaaatatttacagccaactgattttttgataaagagcccaaaaatatacattggtgaaaggacaccctcttcaataaatggttctaggaaacctgaatatctattatgcaaaaagaatgaaactatattcctatctcttgctgtataaaaaattaactcaaaatgaattaaatacttcactataagacctgaaactataaaaatactagaagaaaacctaggcaatactcacatggacattgatttaggcaaagagaatttatgacaaagacctcataagctcaggcaacaaaagcaaaaatagataaatgggactattaaattaaaaagctctgcatagcaaaggaaaaagtcagcagagtgagagacaacctgtacaatgggagaaaatatttgcaaactaatcatccaagaagggactaatatccagaatatatcaggaacccaaacaattgaactgcaaaataataatagaatcccattaaaaagtgaaaaaagaacatttttcaaaagaagaccagtataaatagccaacagatacatgaaaataagttcaacattactaatgatcaagaaaatgcagatcaaaactacaataagctatcacctcatcccagttagaatggctactctcaaaaacacaaaatatagcaaatgctggcaaggatgcagagaacagggaactcttatagactattggtggaatgtaaattagtatagccattatgaaatacagtgtggagagttctcaaaaactgaaaatagaattacaatataatctagcaatttcaatactatgtatttatccaaaggaaaataaatcagtatatcagagtaatacccgcaccccaatgttttgtggagcactactcacaataacaaagataggaaacaacctcagtatccatcaatgaacaaataaataaaaaaagttataactttatggtataaaataaaacatagtatatataacatttatagaaagcgctctctctctctgtgcatgtatatggttgaatagtatttagctataaaaaagaatggaatcctgtcatttgcagtaacgtggatagaactggaggtcattatgtataaagtaaaataagccaggctcagagagatatcacacattctagctcatatgtgggagctaaagaagtgtatcttgtggaggtagagattagaatgatagtcacaagtgtgtagaaagggtggggaagtggaagaagcaaggttggttaatgggtacaaacatacatatcgatagcacagaaggctaattatctataattgttatctataacaacaaagtaattttggaatataataatttttctcactgtttaaaacataagatatgtctgtggatctaaggaaagttgtctaagattcatatgatttaataacatccagatacttaaccaggtacacttaggaatttatgttgaattgtacaatattttgagaaaaaatgattatttgctaaatagtgtgagaataactttctagaatacatgatcagcaagtgcaaggattattttctattttggtcaatgctatgtcttcagggcctagcatatatcgacaataaataattgtgagatgaataagtaaatcctaaaattccaaaccatttcaatttagtgatataagtttttaagctttcactgcaactagcttttgccccttgcaaatatctgagatatatcctataatgggtaaatacttacaagtttaaaatgtttttatatacatagggaattaagactttttgcttaaacaattctcatatccttgtaatgagtcagaaatttgtatccctaattgacagtagaagattatggataaggcagactctgaatggtgctcaactaatagtcattctcttcttccttagagcaacctcatttggatggagcagcaaagtgccaactggaagacgtggaatcccagcttctcttacagtgtgtggtggcccctgacaagaaggttcttacctgtcagatatgggtagataaatttggggtttttgtcttttcaaagatataatgtttatccttgtcttgaacttatccttttaccagcccttcttccccactggaacccagccacagtgcttgaaatgcacgcctctatacattttaagaaaaacaatccttcattttgtttaacccattttattgttttgatgatatatttgtagtatgtagctgaacttacgcttaacataggcatggtggcttagaaagttatatatctagcatggccaaatctaaattgtcaagtccatgtttaaaaactcaacttatccatctccacaattcatgtacttttcataatgctgcactttcttttgaaagtcctagatgctcaatccagtgctcatcattagtatgtccattatataccttccatattttatattctttcaaatacaactccagggaaaataatatacaaaataggatttcaaatagaagaatgactaaaaatgaacagatctcagtgctcatttataagtttgtcctttaagatgtcttcattgagttaagaaacacctggggctattttaaatgaaaattgttttttcaagattttttttatcatttagaccaagataaacgctatgatttttttctagcaatagcaacttcttttgttataaaatatggtcttactttaaaaagaaaaatcattaaaataaaaatatattggcagaatcctatcaaaaatggttcctattaatgacagatggacatgttaaaaaatcctcgaagttttattttcaaattctataagttatttcgtttctgaaataaatcataactttattaaacatggatgatagagtaaaattcattttctgcttccaggcaatacatgttgggaggagacataaaatgtattcataaagataaaaacttgaaagtataggatgtcataggaagttcactgcatttatacttagagatgtactataaaccaagttcaaacattaattgaatgagcaagaacaaatattttaacttccttaaactttgttctatcatttagaaaatgagatcttgttatatttgccaaatgctttgatttttaaaaggttaaaaaaattatgcaatttctttgaaaactggtagacctaaaaaacatattagctatgtttgaatacaaaaaataaattagaaaaataatttagttttatatttattatgacagtcttgaggttgagacgattaagacatgatactaaataattaactaaaacaaaaaccgaataattacaagatatctctaaaagtttaatgttgcatcaaacaccgtgtgttaatttggatctatacattcatacttttaaaaatgtataggttttgttttttaatttttaatttttgagagtacatagtaggtgtatatatttatggggtatgtgagatgtttggatacaggtatgcaatgtgtaataagcacatcatgaaaaatgaggtgtccgccgctcaagcatttatcctttgtgttaccaacattccaattatactttcagttattttaatatgtacaattaaattatttactatagtcactctgttgtgcaatccaaaactaactcttattctattttttgtgtgtacccattaaccatccccatctcccctctacctgcccccaatacccttccaagcctctgataaccatcttactctctgtctccatgagtccaactgttttgacttttagattccacaaataagtgagcacatgcagtgtttgtatttctgtgtctggcttatttaacatgacataatgacctgcagttccattcatgctgttgcaaatgacaggatcccattctttttataaccaaatagtattccattgtgtataatgataatattttctttatctatttatctgtttctgatatggtttggctctgttcccacccaaatttcaccttgaattgtagctcccataattcccacgttgtgggagggactcagggggagataattgaatcatgggggcagttcccccatgctgttctcaaggtagtgaataagtctcacaagatctgatggtttttataaggggaaacccctttcacttggctctctttactcccaccaccatataggaagagcctttcaccttctgccatgattgtgaggcctcccccaccacatggaactgtgagtccattaaacctctttttctttacaaattaccagtcttgggtttgtctttatcagcaagatgaaaacggactaatacagtaagtttggagggctcagaagaagacaagaaaatgtagcaaagtttaaaacttactagagacttgttgaatggctttgaccaaaatgctgataattatatggacaatgaaattcaagctgaggtggtctcagatgaagaggagaaacttgttgggaactggagtaaaggtgactcttgctatgttttagcaaatagacaagtgacattttgcccctgcactagagatttgtggaactttgaactcgagggagatgatttagggcatctggtggaagaaatttctaaggagcaaagcattcaagacgtgacttggatgctgttaaaagcattcagttttaaaaagcaaacagggcataaaagtttagaaaatttgcagcctggtgatgggatagaaaagaaaattccattttctgaggagaaattcaagccaactgtagaaatttgcacaagtaaccaggagccaaatgttaattccaaagacaatgagaaaaatgtctccagggcatgtcagagacctttgcagaagcccctcccatcagatgcccagaggcctaaaaggaaaaaatggttctctgggctgggcacaggatcccactgctgtgtgcagcctagggacttggtgccctgcatcccagatgctctagccatggctaaaaggggccaaggtacagctccagtcagggctttagagggtgcaacccccaagtcttggcagcttccatgtggcattgagtctgtgggggcacagaagtcaagaactgaggtttgggaacctccatctagatttcagaggatatatggcaacatctggatgtccaggcagaagtttgttgcaggggaagagccctcatggagaacctctgctagggcagtgtggaagggaaatatggaggggaagcccctaacacagagtccctactgtggcactgcctagtggagctgtgagaagagggccaccatcctccagaccccagaatcatagatccaccaacagcttgcaaggtgcccctggaaaagctgcagacactcaaccccagcccgtgagagcagctgggagggaggctgtaccctgcaaagccacaggggtggagctgcccaagatcatgagaacccacctctcgcatcagtgtgactgtaagacagggagtcaaaggagatcattttggagctttaaaatttgactaccctactggattttggaattgcatggggcctgtagtgctgtcattttggtcaattttttccttttggaatgggttatttacccaatgcctgcacccccattttatctaggaagtaaataacttgcttttgattttacaggcttgtaggcagaagggacttgccttatctcagacgagactttggacggtggacttttgagttaatgctgaaatgagttaagcctttgggagattgttgggaaggcatgattgtgtattgaaatgagagcacatgagatttgggaggggccaggggtggaataatatggtttgcctgtatcttcacccaaatttcatcttgatttgtagctcccataattcccacgtgttgtaggaggggcccgggggcagataattgaatcatgggggtggttttcccaatactgtccttgtggtagtgaataagtctcataaaatctgatggttttataaagggaaacctcttttgcttggctctttctctctcttgccaagtagtgcctttcatctctgccgtaattgtaaggcctcccccaccagatagaactgtgagtccactaaacctgtttttctttataaattacccaatctctgatatgtccttatcagcagtgtgaaaatggactaatacagtttccaaatcttggctattataaacagtgctgcaacaaacataggggtgaagatgtatcttccatatactgatttcctttcttttgaatgtataatccaggtaccgctggattatatggtatctctatttttagtttttttgtggaacctcaaaactgttcttcagaatgattgtactaatttatattcccaccacaagtgtacaagggttccctttttacatcttcactggtatttgctattgcctgtcttttggataaaagccatgttaactagggtgagatgatatttcattgtagttttgatttgcatttctctgatgatcaataatgttgagcatattttatatacctatttaccatttatataacttcttttcagaaatgtctgtttattacccacttttaaatcagattatttgattttttttcttataaagttgcttgagctccttatatatactggttactaaattgccagatgggtagtttacaaacattttctaccattctatgggttgtctctttactttgttgattgtgtcctttgctatgcagaaggtttttaacttgaggtgaacccatttgtccatgtttgctttggtgccctgtgcttatggagtagtattcaataaagtttttgcccagaccaatgcctggagagtttcctcggtgattgcttggggtagtttcatagtttgaagtcttagatataagcttttaatccattttgacttgatttttgtatatggtgataatctagtttcattcttctgtatatggattatcagttttcccagcaccatttatcgaagagactctcttccccagtgtgtgttcttggcacctttcttgaaaatgagttcactgtacaggtgtggatttgttttcggtttctctattccattccactggtctgtctgtttctatgccagtaccgtgttctttgggttactataactgcagtgtgatttgaagtcaggtaatgcagtttcttctgttttgttctgtttttttcacttagaatagctttagccattcttggtcttttttggtttcatataaattttaggttttttttttctatttctctgaaaagtgccattggtattttgatagatattacattgaatctgtagattattttgggtaatgtggatgttttaacaatattgactcttctaatccatgaacgtggggtatctttcccttttttggtgtcctcttcaatttccttcaacagtgttttatggtttttattagagagatctttgacttctttggttaattcctaggtatttcattttatttatagctattgtaaatggattacttttctgatttatttttcagattgtttacttttggcacataaaaatactcctgatttttgtatgttgttttgtgtcctgcaactttactgaatttgtttatcagttctaatagtattttggtggtgactttaggtttttccaaatatagtatcatatcatctgcaaacaatgataattttatttttcattttccatttggatgcctttgatttccttcattgttattcaacataggacttcacagtacttgttgaatatcagatcaatgccccagagaataaaaatgggcaaccttatcatccagaccttagaggaaaggctttcagttaagatgtgtattttttgtatttcatctacaattattaaaataagcatagcttttaagcattattagcattaagaagaatatctaaaaagataacatattgatatgtttatttctatagtatcaagaatttaggaaaaaaataaggaaatatgctttttaaaagaaggatagcccatacatggtgtctcacacctgtaatgctagcaatttgggaagagggcagtttgcttgagcccaggagttggggaccagcctgggaaacatggcaaaacccactttctactgaaaaaaaacaaaaaacaaaaaaattagccaggcatggtggtacatgcctgtagtcccagcaccttggaaggctgagttggaaggatcaactgaacccagaaagccaaggctgcagtgagctgaaattgcaccactgcaccccagcctgggcaacaggaatgagaccctgtctcaaaaaaacaaataacgaaaagaaaagaaaaaggctaaaactatgattcacttaatcatacgtaaaatgttttaccttctaaatagagaagctacaaaacctcacaaaagaacataataggaaatctgaacaatagaaagaagtaccataatattgggcaagaagatatatgtttaaaagtacctattctttcagaatcaatgcatgattttaaaattctaactaatattctctttttataaggggaataatataaactattttagaacagtgaagaaataatggaaaataaagtgatacaataggaatcatctcagtaattattccattagtaacatattctaatgccatcataatcaaattagtattgtagtaacaagctcaggtggctagatcagtgcgcaacacagataattcagaaataggtctaagtgtatatgagaatgtaacatataaaacaggtaatattttaattcataggaaaggacagttaatttttataaattgtgtgggcatatgtggccacatctctggagtaaaactgtgtcacatctgtaacacatacattctgtttgacttcaagtctctctattgatgaaaatgtgaatagtttcaaactttggcaaagcatttaaaaataaatattaaaattaaaactgcacacacactttttttgcctgtccgttgcattcaattactctatctcttggagctgaatttatttctgtgaggctttatgtataattatatttattactgcatttctcataatagccaaaaaaaggaataaaagcatacaaatacagtatatgtccaaacatgcaatatcaaggactacgtaaataaattacatttaaaatctgcatcatggaataatatctaaatgtgcaaattatcattaatgcatttcattttcttcttctccaccttgaaaattttgtgttttccatatattttcatctcagaaaaaatgcagactaaactttaaatttcccaggtccacttcttaattccatactccacaatcccccttcacaattggtatcaatgctgttttcctcctcaccatcaatgctttctcaactatgactacttatcataaatccaactatttataagtttcatatattctaaaaaataaaaaaaggaaacagcatatacaaagataaaactcccttctaaagttctactgcatcaagctgaactttctctgcttttatcgccttagaatcctgtcacttctgttaaagtcttcaccagccatttgttaataaggctcaaggcactggactagcctttcatagatccgcagaggcctccataacaccaaaaccaagactctgccagtattcatgatctttgacctctatgcatatgacacaattgaccataaagccttctggaagcaatgacgcatgaaaaaccacttgggtagcagaaagagaaaggacaaaacacattttagaaatatttaagtggcaaaatcaaatcaattgatgattgactgattgattacctagatgaaggaattcagtgactcaccggatatcagataatgaagacaggagttatgtgaacctgcttttgggacttgggtagagtgtgataccagctgcttttctcctcaccataaatgctttctccctgtgaatcaaaacagatttataccttataaaagaaggctaggatttacatggaagtgatgaagcatctgtaaacctgtgagattatcaaacacaacatttttaatcagatgtctatgagtccgaagatcatagcaaaatatcataatgtctatgaaatggctaaattattctaggagagatatagagtgtggtaaaatgttggtcaggaatagatttttggaaatatcgaagttttataaatatatatattaaaagaaactcatggggaaataaaagataaatgggaatttgaactgaatattttctatctgatcctttagatcctctttccacccaactccacactgccccatgcttcaggatcaaagtctggtgacaagtttatgcctgctgtcccagtttaattatgaatgacacactttcttattataaaaatagtccttattttaactgtagattatatggctatccaaaccaggactctctggtttctctttggcttcagccactagagatcagatggaggaaggagaaggaagtcagaaaatttgtttctgtggcatcctttttgacttgttacatttggttggtggttgttcttattggccccagctgatggaatgagcaagtttccagatgatcccattggaaggggatatgtgtctcttccaagatcttgattgatgcaggggtatgggcagatccaagacagtgtagtgtcaaggaagtcaagaaagaattttccaagacttgtgtaatacatgggggtggacaaagcaaatgcaacaggtagtccagcaagacgaagaaaagatagtcaaaattatgaacagtcataaaaagtatggaaattataaattttgtttcaggtagagacaacagataaacatacattaggcataaaatatttaaaaagaaaatagccaaaaaaacaaaaacttttctgtttagttcaacaattattaatgacctcctattctgattttaggggccattgtctgaagtacacgtagggaagaaattatagaaaggcgaaactaaggaagtcactatatatattgatataataatttatttgagtttgaacctatttatacttactcatgtttggaaaaatgcaagcagatagagaatttttgtggacacaatattccaaacaaacatacttttgcccagcttatgaagacttactttcaccaaagttatagaaatactttgggatcaatatttggcatcattcagcagatatggaaggtaataagttgtttagctatgttttaatcctcttcttggtgtgctcactgactattataagctgaaaatatgaatggccaaaataaaataaactatatgattattagaaacaatactaataactcctagaaaacaaagacatacacaaatatctaaaaacatggcaaattgctggagaatgattgtggagaaaagttaaattagcagaatgtaagaagtttggcattttcgggaatttagaagccagagtaattaaccagtaaagaaagagttaggtcctgccacttcttcccaagttctcatcatttttcaaggatttggtacatctggggattctgatagctaagccctgtatccaatttagaaagagcatccctaatgttagctgaaggcagtggagtagaaatttatcactaaggaacgaaatgcattccttttggcagaaagctgcttagaggaatgtattttatgtggtataaaagtgcatggaaattttagttgtatttttctttaaatctatgaaaaactttatgtctttgagggataaaccctatgcagctattgggaaaataggaaacatcttaaagaagaacaaacttatccaacattgcacactattctgtttcctatttcataggctgggccacctgaaattttataacccaaccaaactttagattccttgcattttcatacaggtctccagaaatgggaatgatactcttgctaaaatatctgctattcggagtctattctgcttagaaaattagcagaatcaaggaccataaatagatagcatgtcatcttccagcttacttttgaagagatctctataccattgaatcttctgggtttgaattagagtaaatggtcaatgaataaagacaggaagaatggagagagaacagtatctgataactaaaaccccccaacaagcaccagaacatttttcttttttaataaaatgagttcttctattttcgtttcttcttcaaattagtaaaagagtttgaaaggtacaatttcaatgtgccaaagtgaaaattttctcccctgattaacaaatactgttactggctgtgaggcagaaagttgtatataagcagtgattaaatatataatggggtaatagtgaaactctggtaaaccctcacacattttagagaatgacagagctttctagttgtctatgaagttacagatgtgaagagcaaacttttttcttctcttagaggggctgagcatgccattgtcacctacttttcaggagggaaagatactagaagaatattgctatcctctgatcacaagtcacccactgggtcagtcactctttccttaaggacttttggaaaattgcacaattacgggttgtcctttgcaaacagctgtgctcacgacttaaacaccgttttcttttattgcaatgtcggggtccttaaggagtccagattatcttgttgctcagagaattaataaaatttaggtagaggggaaggaaagttcattttgaagcccaataggcctcacgtttaagtcatgttctatattattttattagtaaagaagctggtatttaatctccatctgtttgatttccaaattttatctgtcggcacgttttgaatttgtaataggcttgactgtcagaacaatattcactcctaaaaattcaaccactttccacttattatcaattgtgccttttcctataatttccattaaaaattcatggtttttgcctaatttaattaataattaccaacaatagaaatgccaagtccataaaattgatagaaattggggtgttttgtggagttaataatttggtttacttttctcatctttcatagaactttcttaaccatgtagaatgttctgccacaagcagaagctcaataagttctgctgatttgttttaacaagtataagatttgttttcttttgccatgcaaatctggcttactagaaaaagcattgacacaagaaggaagtcaatatttatggtctgagcatttccagtgttaataggcttaagagtgtacaaaatgcagacgactaggctataaaatgactttgtctttccctaatcaggaaaaactaccaaaaatgtaatgtacaaaaatatataaactgagtaagcgtgtgccctattgtcacttatacttctgtttttctatgtaagtcaaaatgtagcttatataggaaccagctagaagaatgatgtatggatatttataggggaaaatctcatggttctccaaggaatgcctttctgtatgtaaacaactctttaagttacaaggctcttcgaaaaatggcatgttctattcaatgtagattcaatgaaagaatatagattgccaaaatcattttatgaaaaacgatagcattatggtcccacaccttcaggtcttcaaacacacacacacacacacacacacacacgcacacacacacaccatattatggaaagataatgttctcttgttctaaatcacaaaccaataaaatattcgtattctatttcaagccatactcatactttaacctagtccttgcacaagtacaaatactccctccttttttttttttttttacagaaattcacatttcagtctgtcactgaaatggtctgtcaaaaggctagcccattttcttaatctagttcctatacaatatacaaatactgttttttgcctgaatgcgcatttcagtcagctgagcctatttcattgatataaataattaggtagcggaaacatctttttgagatgtttatacatcaacagaagtctccattatcctttatttatgacctaaggggataaaaatatgaatccaaaattcgtaggaatacaaaatggctgactcatgcttcttgcaaaatgtatgctttccatatgaccattaagaaatagtggctctacccctaggtctctaccgctatttctctcctctctatctcttcaagcttacttacccttgtactcattcttccttaaaattccttttcgtatgctagatgttgattcatctcttgtcattttctacttaattcttgcctcccaatagatgttacattcagaaaaaacatatttcagttacagaaacatgcaactctttcttacctaaacatttttttcacttcaaccaccctattcctttttattttcctttaaagattaacatatttgagaaaccatctcttaaactgtctcattttgggttaggtggaggatttctagataaaactcaagacacatagtaaaatttgaatttcagataaacaataattttttagtatattacaaacagtgcatgggtgtgttttttgtggatattcaggggaggggggtggagagaggaaaatttcccacaatgaatgtaaacttgtgagcaggatagaccctatgaagtataaaattagctcaatgtgaattaacttgtattgcaatacaatggcatttccaaatacaacttgtatctacaaagtgatttgatattttctgaccatgaaagtttgggcacttaagccataattttgagaaaaaatgtattatatcctttccattctgtgaagtctgttttgaattttatttatgaatgatctgaccaagtcataccattttctagtacagaaaactgctttcttgtaggtttactaataactaaaaacagggcattttactgctactgctaagtatgatatctcactcttgctatgtattcagaatgagtacagaatcatttaatcaaagagtaaggtaatatccactgagaagttgatgaaaccctcacattgtttgaggaacagttttaattcactcaaattgacatctgtaactgataatcacagggcataataaaacattaaaaaaaaattaaccctggtgtttgccattcagtaatataacagcatctagttccctatcagtatcattaaattcaaataaaatacaaactaatattcacttcaacctattttctacagtgaatatttgaaatattttctttaaaaagctaaatgtagtgataaatcagattacaacactgtaaattctttatgttatctttaaaaagcttgcatatgtttcacagatatttattacacatatatacacataagaaagatgttttaatggaggaaaaagtttaaataatttgatgtcaacctaataaaatatcattaattgtatgggtgttcacctctggctgggggcataaggctccagatgattttaatgttcttccttgctgagcaacattttctagatagtctgtaatcaacacatttttagccagtaataagaaacatatttcttaaaatagtttaaaaaatattttaccttttattactcatatcatttgccagaggcccaaatacatatagatcctattgagctgtctgtgcttaggaaaccgagaatgtgaaacctgctggatgatgaaatagcagggaaagcaataatttatttcctaacaagctatatataagtcacttcttgagtgaagaataggtcaattgtactttgtttggaattgttatttatgttttcaagtgaatatgtttaacatttccccagagtccctttctgtagttcttaatgatttcagctatttattagcatatgctcccaggctaaaacaaaatattccaggggatgaatttctcagttttgtaaaaaaagtggatttgtgcaagaaaacactgccctcaagcctctgtgctgagaaattaatctctacaaacatagagaaatccccattgttcaaacaagttcttagggcacaaaacatggaaaataacctgaacttcgtcatcaccactagaatatttttctatgtttatctgttgaaaattacatagcatgtctaataggacactttctaaatctgtgaaatactatgcaactttaaatgaagccacttttactctgatgaactgccacatggcaaagcaaggacataaaaatccattcaaataggtgttataaaacagatttattaaagaatgtattactaaaaaatgtaataccaagggacaaacaggcatacacagatattgaaatataattaaaattattactgtatagtcctattaaatatatgacaattgcaaaatactcaacaaatacaatattcataggcacattttttgtaacgattatatacattttagtactctctcatatttcactgtgattataaatagaactactcaaatatatttgtttcttccaaaccagttgttaagactaaaatgagacacaaaataaatgatcggaataaaaatatcaaagtcccttttatattcattagaaattgttttccttgctgtcacccaaagtttcacacatatctcagaagtggaataatgggtttgttagaattctgtcctctaaataagagtcctctacctttacttacatacaatgcaaggtaggtcaaaaatctctcttctttagaacacaatcatattgaacaaaagttctatatactctgttactatttgcttatcttccacttactttcagtttattttaaccactcacatcccacgactacactgagaccccttcttttatgatcatggattaatttcttgttaaaaaaactctctgagccttgcttaattgctggaaacatctgaaacttcctcccctttgatctatttgacattcttaattaccatcaggactgtttaactaggcctttctcattcctcagtcaagatttcccttaccttaagtgctgggcttctcagacgtctgacttcatgctgtgttcttcccactccacacatgcatccttggcaattatactaatggcttcactatttatagtatttggaggtaggtccatatttaggtcactactttgaatcatcctctccatttctgaaggtttattttctggatagttccacaaagaattttcatcaggcagcttatactccgtatgttgaaagtggtctgtctcctcttcaattcacaaactaacgcagtcagtgactcgatttcagccggttgcagaaaccagtattctgaaggaatctttgactcttcgatctctccagacacagtgaactaccaagtcctctcaagttaactttccgaatatttcttgagtttgcactcttctctagtccactgatgccatctcagtcaaggcaaacattatttcttgtctagatgatggctaacaaaactccctccaacttatccttcacatagcatcgaaatgcatagttgatcatgagatgccatggcttgaaacttttaaagaaacttctcattgtgctttaaaaaaatctacttgatattatgtaaaagctatctatgatatggttcattgctcatgcctttacctaaagaatcccttaattaaattccttgcagaaattatgtatattatatgtatatatataaaatgtatgtgtgtctatatacatttatatgtaatgtgtgtgtaaacatatacacacattatatataaatacgtatgtgtatctacagacatatatattaaattccttgcagtaaatatataatgcattatatatcaattaattataataatatatacattacacatttaatttacatatgtattacgtatatgtaatgtaattatatataattttatatatattacatataattataattatatatagatcttatatataatcatatattatataatgcatataattatataatgtaatatacagtatatataattatatattatatgtaatatattatgcatataattgctataatgcagctccaatattttccaataggataaggccaaattgtgtataattctggttttaatttttattttcctattaatgaagttaagcattttcacataaatctttatgacacatatataatatgtgtatatatatgtgtatatattatatataaatttatatatacacatatatgcacatatatacacatatatacatatatacacacatataaacatatatacacatatatacatatatacacgtaaatttatatatatacacatacatattttaaatctgaagttgaaatatatgtgtatatatatttaaatttatatatgtgtatatatatttaaatttatatatatatacacatatacatattttaaatcgaagttgcaaacttatctcagttctcatatattaaagtaccaatcagcttagtaccagaggcatatgggtctagttatattactattatcatcaccatcatcatcatttttttttccatgatgagccttaagccatgtgaaactcatgggcacaaaaggtaaaactttaattgactattaccatgctcaccacttttaaaactttatctagactttttaaaaaatatgtcctaaatttgcaaagtgtttgaaggattttctttttcagtttgagccagaaccttataaaagactggttataatctagctacagctaggagagatacatttcactgacactgccagcatcttctatgcgatgattcatttccacaactgaagaaaacactaacctatgaatcttgggtttttttcttaataaatcagttcctaattatccctctcatctttgatcttctatgtaaagcactatgttctcctttcttttacattttgatcaaaatagttatttttctgaattgcttgtaattttaaaagtataacacatgtgtagctgatttttcttttatcctactgtggtattaaaatctcattcatatatacacaacatggataatgagtagggggcttttagaaaaaagcaaaaataaacactatatattaccacctagtttaaaatatcaaacattaatgataactttgaaaccttttcatgatcacattttgtatctaacacccagagctatccatatttttgaatgtctatttcatgttaccttgctttctactgagttttacaaatggacttatttgcctgtttttgtacattatacaaatggtatcacactgtatgaatcctaacatggtttatattttgttgactaatattatgttgtagaagttacctatgtttctgtgtgtggctatagtccagtttcacggctatacagtattcagtttaatgaatagccaaatttattcatccattctcctcttggttgaaaatttacttgtttatatatgtttgcatttacaaatgattctgctaggaaacctcttctgtctcatgttgaacttctaattgattaatatatagggtacttcctcagaaaaaaaatttgctgtagaagggggtatgcatgtgttatagaaaataccaattttctggccaaattattccatattctgttgaaccctcccatgagcagaatatgatctcctgagactccagatcctcatcaaatcttgctacaatgcagctacaatattttctcaccaatgtgctaaagccaaattgtgtataattctggttttaatttttattttcctgttaagtaatgaagttaagcatctttacataaaccttcatgactcatataagggatttctttgtaaaatgtttgatatcttttattcattttgtattacattgtctaatttctactaattgttaacaattaatcatatgttttggataccaagggtttgtgggttaaaaatgttcaaactatccttcccattttgtagcattttactttatttattggattttagaagaacagaaattttgaatttgattgtaatcaaacagttttatttttatttttatttttttgagacagaatctcattctgtcacccaggctggagtgcaatggcacgatctcggctcactgcaacctctacctcctgggttcaagcaattctcctgcctcagcctcccgagtaactgggattactgtcacatgccaccacgctcggttaatgttttgtatttttagtagagatggagtttcaccatgttggacaggctggtctcaaactcctgatctcaggtgatccacccgccttagtctcccaaagtgctgggattacaggcataagccaccgagcccagccaaaaagttttatttttaataaatgtttaaggcaaaattatttattaaaaatttttagtaaatttttaataaagtcaggcagtggaggcagatacttctgagcctgtgggggcagggagtgtcctcctgggcccctgagagtacagagatacccagttccacagccacagcttcggtggctgcagctgtgcctaggagggtgggggtcctgtcttctcctggaccccaagagcacagggatgcctgggtccacagccatggctgggtggctgtggctgcatgcaggtagcacgaggctcctgctctgccagcttagaaggggctaggcttctgcctgttcctggatcccactggctcagtggagcacacagccctggctgcgcctccccaactttagctggcatcatggcaacagttgctccagataggtcaccgctgccagcagaaggatacttcacctatgttattattctctaaaagtataattgtgagatttgtcctcagactaattttaagaaaataagcagtccacagatgaattttaagaaaacatcagagcaactcaaattgagaaacactttacagaatacctgaccagtactcctcaaaactgtgaagggtataaaaacaaaaaagactaagaaatagtcacagaccagataagattaagggggcatcacagtaaaatgaaatgtggcatcctgaactcagttctgggatagtgaaagaacattagtggaaaaacttgtgaaatcaaagaataggagttcagttaatggtaatgtactaatgatggtgtcaacctaaaagtgcctgagacaggtctcaatcaatttagaggtttatttttccaagattgaggatgtgaccagggaaaaagagacaaaatttacagtgggatctgtgggatgcactttttccaaaaagagttttaaggagctcaatatttaaatgggaaagagcagcaggaaggcaaagagggaagaaaaatggagagaagggtaggtagtgaggtcagcaaatacattcttgagaggctttgattaatgctcactgaatccacattttacatgtttctcaatttaagtttctctgatgtttttcttaaaattggtctgaagaattatgatttttgtaaaatttagtctggggactaattcttataattattattttggggaagaataatgtgtaatttcacatgtgaaaagaaagaagtgggggaataaattaattatgcattcatctagcactcgataggtctacattttacataagataaaataagtatgtgtaattacagctatctgttgaaaaaaggaactcagttttttttcgatgactcagtcccttagcttaacttttacctttggaatggtgactttggggtcctgagattttattttttttcacaatggtttcttagttgtgacaattttaatatagttattattttagaaacacggaaaaatcttgccttcaggagctgacaagcacaggagggaggccaaggagggctgagggccactcagtgcttgcctgaaggcacctcttggcatgaccagcctgggtgccacgaactgcagcaggaggcagacaggctcctgggtgggaaggggtgggtccccaatgaagccccatcttcaagcaacggaaggcctgaattctggggactgggctgccagctcggtggaccagagtgggaacttatagtgctttatctgagcccacccatggccactcatggaccaatcagcatgcacttcctctcctctgaagcatataaaaatccccagacttagccaggctcaaaaagagaaaggatgaccaactgttgagaggagctatccactccagggtctcctctctgctcaaagctgagaggatgacaggacaacctgcctgcagagaggagctacccactccagtgtctcctctctaatgagagcgggacactcatcaggacaccctggctgcagagaaaaatctacctactgtgggtctcctctgagctgttctatcactcaataaatctcctttttaccttgctcaccctccttttgtccatgtgcctcattcttcctaggcacaggacaagaactcaggactcactgaatgggggcgctaaaagagcgcaacacaaacagggttgaaatatgccccttggtcaccatgttgcagatgacaagaaggagagaagagctatggccctttgaggagcccagacttacgagttccctgagccagggctgtgataccctcttggggctccaaggcatctccaagcttctgggtgtctccaagcttccaggtgccaccgccttccccagtgccagctgtggaagctgcttgctctattcctggtccagctgaagcctcacagggagctggtgcccatgccactgcagccagcacgcttggctgtgcacagtggccagacccacgcttgcttgctcacacatgcttgcttgcccttaccgctgtgctcacccttggatgcataggatccaggccagtaacgtgagctgagcacagccttccaggccaagtgagcccagtgggcctgagcaaaacttgggcacaggtgccactggccacagaggtttctggctggtgaagttgacatcccaaggatcctgtaacacttcctattacattatattagtaggtatatggtattagccatattaaatcaatgtgatgtaggcatcttgccagaaagtatttactatcttaatggcatgctacaaacacatcacaattcactaattaattgaaatgtgaacctcaaatatctgagacaggtcttagtcaatttgggaactttattttgccaaagttaagggtgcgtccctgtgacacagcttcaggagcttctcacaagtgtccaaggtggctggggcacacctggtttatacattttagggaagcataagacatcgatcaatacatgcaagatgtacattggttcagtccagaaaggtcagacaacttgaagtggggagggggcttccaggtcataggtagataagaggcaaataatttcattcttctgagtttttgatgagcctttccaaaggaagcaatcagatatacatttatctcagtgtgcagaaggatgactttgaacagaatgggaggcaggtttgccctaagcagttctcagctttacttttccctttagcttagtgactttggggtcccaagagttatttttctttcacagatatctgctttttttttttttttttttttttttgagacggagtctcactctttcgcccaagctggactgcagtggcgctatcccggctcactgcaagctccgcctcttgggttcatgccattctcctgcctcagcctcccgagtagctgggattacaggcgcccaccaccacgcccggctaattttttgtatttttagtagagacggggtttcaccgtgttagccaggatggtctcgatgtcctgacctcgtgatccccccgcctccgcctcccaaagtgctgggattacaggcgtgagccaccgcgcccggccagatatctgctttttgaaaatatcctttacttggataatgatgcttgaaattgctgactgctgaaaattaattagcttttgggccatcagagcaagtgggaatgtaattgagttctgtatagaccagggtgtttctaaaagtgtcttcttaggagagttctaaggagacatttttttttctcctctttccatcgagcacaataggtaaaacacacaagtttctctgccgtttctctttgtatgaagagcttatttaccctgaagtttcaacactcaagggcctccgcttgatgcaaagacccgaggctctgtttcctttccccacatggccactgaaacaatgcctccaatgactgggtgaggctcacaccctcagggcagcccctggcaccagtaacttcctatctctctggagtcctttgtctcatgctggccggatattactaggtcatccatatgtttaaaaattcattaaaatatattttattcagcacttaaattttttttctgtgttagaattattttaggatctgctgtttgctatgctttctgtttttacacgtaatttcttctcaatattttctttacaccttccatgatccatctctttcaaaagatggtttaataatttatttttagtatctattttgacatgttaccttgctcatgtttaaggttttccattaattactcaaagaaagataaagtagggtaaacagtgaataagaacagagaaaatgggattgataccagctacaggttgagcattaccaatctggaaattcataatttgaaatattcctaattctgaaattttctgagcaccaacatgataccacgggtggaaaattctacccctaactcttaccgggggtccttgctcacagagctcctcagatggtggcgagccacttccaagatggtggtaggccacttccaagatggtggctagcctcgtgttctctgacctggggttcttggcctcacagattccaaggaatggaatcttgggccgtgcggtgagtgttatagctctattagaagccatgggtcatggaagagaaccgtggaacccagtgactagtgttcagctcaattaggatgaacctgggcacttagccgtgcaggaacaacggcaagcctttagcccaatcaggattggcaatgggtgcctcgctggttcaggagcacagcggacagcctgccggatccggagggatgggagtcagtggcaggtctgcgacagcggcaaacagcagtggtggaaagcgagcgaaagctcagctcgagccgtaacaaacatggaccagaagaatgcagttgcaagatttagtagagtgaaatagagtgaaaacagagctcccatacaaaggcaggggacccaaagggggttgccgttgccagcttgaatgcctgggtttacatcctgatccttgtccctcctgctgtgctctcaggcaatagatgattggctatttctttacctcctgtttttgcctaattagcattttagtgagctctctgactggttgggtgtgagctaagttgcgagccccatgtttaaaagtggatgcggtcaccttcccagctaggcttagggattcttagtcagcctaggaaatccagctagtcctgtctctcagtacccgccctcaacaggaaaacccaagtgctgttggggaggttggccaatgacagctctaactgcttcctgctgaattggggcatagtaggggttgggcagttgtgatttccttgggaggggtgccttcgatgtcattaatatcggagcatgggctagcaggccagtctaggggcccgcggtggatcttagtcatggactgcatctggggccccatttgaagaactatttgtagttttacagttttgattctggaagagacaaacttaacaaggaggttaaagatacagggattgaaatgtatggcctgcagtgcaggggattatttctttggcatacttcacaggccctgactatctgcttgatagttttgaaaaggcctggtccagtaaataataatttggccatctgatgggtgctatcaatgcctaagtggaaggtttggtgataagtaatttctattggttagctgcagacaaaagtatttctccttcttcagtggctagccatctggaggggaggaaagtatgtccttgtgaggttccctattctatttttcctgctgaatgctggggcttggtttcctggaggggattaccctatactaggggtccttctataagcatttctaatggagggtcctgccttgcggctcttttgacttgagtatccgcttggtggttcctttctattttcctttcttttcctttctgatgaccttggcagtgtaagattgttacctctttaggtttctgtacagccaataataatctcctaatggcttcctgatgtttgatacgtgttccttcggaagttaggaattccttttctctctacattgttgcatgggcatggaggagtaggtaagcatgcttagaggctgtatatatatttaccttttttctttctcctaattctagtgcccaagtgagggctattagttctgccagctgagcactagttcttggagtgaggggattacttttaagtattccattatcactgaccactgcatagctcacttttagaagtttccttgtagaaaaaggacttcaatcagtatacaagttgaggtcaggatcagtcaagggaaactaaaaggtcccctctagtggcataggtttgagcaattacttgttgacagttatgttctaacttttcttcattgtctgaaagaaatgtggctgggttaagagttgcacaagtgcgcagtcgcagcactggccctttaagtaatagagcctgatatttaagtaaatggttgtctgacagccacgagtctcctttagcagtgagtatgccattcacatcatgagatgttcacacagtaagatcccttccctgtattattttaactgcttcagacactaagactgctactgctgccactacccgtaaacaatgaggccaaccctttgccactacatctatttccttacttagctatgccacaggttgcaagctcatcctttggacccgtgtaaggactcctagagctattcctgttttttctgtgacatataaagaaaagtcttgcccggttggcaagctcaacactggggcttgggttagggccttctttagggcctggaaagccgcttctgcttcaggtgtccatcttactaaatgggtattggctttctgagtttccttaattagtgtatataatggtctggctatttcgcagtacttaggaatccatattcggcagaaaactgttatgccaaggaaccctcttagttgctttagggttttgggatgaggataagccagtataggctggatacgttcctcactgagggccctggtgcctttggataattttagccctaaatatttaacctgctgtgagcagagctgagcctttcatttggaaaccttgtagccacaggtagcgaggaaattaaagagtgcttgggtggcttgatggcacaaggtttctgaacgggtggctaaaattaaatcatccctgtaccaaaggaagagtgtccaggtgtgagaattggctcaagtcatgggctaatgcctggccaaatagatgggggctatccttgaacttttggggtaaaacagtccaggtgaattgagacgttgggttcgaagaatcctcaaaggcaaacaagaattgagagttaggatgtacagggatgcagaaaaaggcatctttaaggtccagaactgtaaaccactctgcttcctctagtatttgggaaagcagagtataagggtgaggtacagctgggtatagagggacaacggcctcattgataaccctgagatcttgcactaacctccactgtccgttgggtttctgtactcataaaattggagtattgcaggtgctactgcatgcttttactaggccttgggcttttaggtccttaacaatcttttggagtccttgttgggccttgggtctaaggggtactgcctttggtagggaaaggaggtggaatcctttagtttaacttgaacaggatgggcattctttgctcatctatattgtccctccgttgcctagacttcaggattaattccttcctcaagcaggggacaacaaatgggtgttccttctcctatgttcaggtgtataatggcccttgcttttgctagaatgtctctccttaataagggagtggggctttcaggcataattagaaaagcatgtgaaaagagtaaagctccacagtcacagcttagtggctgggagaagtatctagtgactggctgtcctaggactcctcagatagtgacagatctggaggacagttgtctgggacaggagagtaagactgagaaggccgtgccagtgtccaggagacagttaacctcctggccctcaatggtcaagcatatctggggccctgtgagggtgacagcatgggctggcacttgccccaggcaccctcagtcctgctgctgaatcatctagttagtggcttctgactcagaggagcttcatcccctggggcagtggaccttccagtgattcctttgacagaaggggcatggacgaggggggagcttacttctacttggacaatctttttttaaagtgtccttgtacaccgcactggaagcaagccctattaggcattcgatttgcccagcttttcccttttccagagcctccaaagtccacttgcctgaggaccatgactaaagcggtggtctttttttttatcccatttgtcccgttccgcctactcctcctgatctctattataaaaaacagaggttgccaagatcaatagggtttctaagttttgctccaggcctaaggtggacttttgaagctttttttctgatgtctgaagctgactgagtgataaacttatcctttaagattaattggccttcaatagagtcaggtgacagagaggtatgcttcctcaatgccccccttagtgtctccagaaaggcagtaggattttcttcctttccctgtgttatagtggacatcattgaataattcataggcttcttcctagttttccttagtccttctagcacgtaagttagctaatgtctgcagtaccatgttctgattctgtgtcccagtgaggatctacactgggaactgcctgctggcctgtggggaatcgttctctttcctctgttgtcatcctatcattgacctgactgagataccagagatcgtcaaactctcgggctgcagttatggtggcacttctctcatttggggttagtgtctgatttagcagtaacattatatctctccattgcagatcaaaggattgtcctaacccttgtaaaacatcaatatagccatcaggattatctgagaatttacctaggtctattttaatttgctttaagtctgagagagaaaaaggtacatgcactctggctgggctgaattctcttcctaccactgcttggaggggacataatcagggaatattggcactgtttggttcattgttcatccctttgtctatctcctttggaccacttgggtaacagggggtccttattggttggggaaggagtcgggggcatgctgggataggcaggtagactctgagggcttcctgtagggcataaaccacactttttacataattgcgagttgtctcttaatgaaaataaagtttgcacctatggcacttcactacatttgccctcctttctacagaagagatctagcagtaagatgttgttataatttatacttctctcaggaggccaggtttctcccccttgaagagggtatcgtggccaggcggtactgcagaagaatataagtcatttctttcttagcgtctgagggtcaaattggtcctaattctccagaatacatcttaggggcgtttttgccttggggtggggggaacgtttcccatctgaaaaaagaacatagggatgccagcacccctagtcattttccgatgagcattagccctagagcgtcctctaagggcctaatgcttattcttttccagggtgagtaaccacccatggacctctgcttatcggattagttatgctcaccgatgtagcagtcctgcacctgttttcccgcctcccttgaccacaaagaaaggggtccgggctgctggattctagtggtcctttaccagcatgcccaacattgcctttgcgaccaggggtgagtcctagagcttggctgggttcctgagcatttcataaccacctagctgccccattaagatgcattcctataaaagcagttcttatgaaaatttatttcaaagagggcataggtaaccttttgagtaaggattgagaagtctttttgattctgtaagtattttaaggcttgtctgagtggaaacagctggcatgtttaaggagacaaatttttaggcaatttttctaactgcttccacaagagtctctgtatcaattactgaatacccattgtggtttttttcctcagtcacctgggaggaaccatctatcgtcctgtcctgaagggagttcctcctaggtctggtcggacctttgtgtggtaattaagatttaaatcctctgttaggaaatctgctgggttaagggaattatcagtggttggagttacattacccttttctaacaggatagccccatactttaagatttttgagttagtaagctatcctttttgctttttcgacttagaaaactggcgaggtgttctcacaatgaggtttcctctaaaagttatttttctacttttagcaaagcagttgctgctacagatcgaatgcatctgcgggttactgggttaaggatttttgataggaaagctacgggttgtcagtggtctcagtgatttcaggctacgcccttgtttacactgacaacaaggtagtattgcagtgttatagggtcacgcagaagaccttcaattaccaattatagattttaaatttaccctggcttttaaaggaatagggcacactggttttttttttttctttactttttttttttttttttttactatttctatctttttctttctttttctctttgactccttctttatctctctctctctccgtctctctttctgtctctctgtctctctctctctccgtctctctctctctctcttagccattacaaacttggggccctggcaaggatggtgtggaacgggtcccacgtaactgcccatgttgagagctgtatacctaaatcagaagggacaccagggataagactccctcggttatagcctaggtgcttaaggacgcagagtagagcttccttagatccctttggagatacaacttgctagaggaattaaaagtctgaaccatcagtacctaggaggcagggatcagaggacgtagattcagaggtaaggagaatattggggctacactttcaagaaagtcgtggttgggacccaggaggtatgggtcagaaggaaaggtaagaggcacatgcatgggagactgttaaagagacttctggctgcaccatgatctcaaccggctaccgccgggagctcgggactacagctttctgcctctagttggccctcgacttccccaagaaaattgaaagtggaagctacctccagattgtccaatgtccccaacccagaagggttgggggttgttagaaagcccttccccagatagcctcacacctgggtcttaactctggcggccacgctaatcatttttaactggctgacaagtgcccggtattttccttcaattctaaggaaggataggacagaagagcaagtgaaagtggtccagtattactcaccgctttggaggtcccttcctggttgccaaaatggtggcgagccacttccaagatggtggcaagccgcttctaagatggtggcaagcctcaggttctctaacctggggttcttggcctcacagattccaaggaatggaatcttgggccatgtggtgagtgttatagctctgtcagaagccgtgggtcacggaagagaaccgtggaacccagtgactactgtttagcttgattaggacgaacccgggcacttagccgtgcaggaacaacggcaagcctttagcccaatcaggagcagcaatgggcgcctcgctggatcagaagcacagtggacaccctgccggatccggagggatgggagtcagcggcaggtctgcgacggcagcaaacagcagtggtggacggtgagtgaaagctcagctcgagctgtaacaaacatggaccagaagagtgcagttgcaagatttaatagagtgaaatagagtgaaaacagagctcccatacaaagggaggagacccaaagggggttgccgttgcaggcttgaatgcctgggtttatatcctgatccttgtccctcatgctgtgctctcaggcaatagatgattggctatttctttacctcctgtttttgcctaattagcattttagtgagctgtctaactggttagatgtgagctaagttgcaagtgccgtgtttaaaagtggatgcggtcaccttcccagctaggcttaaggattcttagtcggcctatgaaagccagctagtcctgtctctcataacctcatgtgactaggcacagtgaaaaagcagtcgaagcttcatttgcacaaagttattgaagacattatataaaattacctttaagctatatgtatcaatatatatgaaatataaatgaattttgtgtttagacttgggtttcattcttaagatatctcatcctgtatatgtaaatcttcccaaattccaaacatttctggtcccaaacatttcaaataaggaatattcaacccatatgataggagtgcaaaaagagaaaaggatttgaaaatgaagagggttaaatgcaaatgttactcagaataaaatagatgatatttttagcattagcaatcttacatcctagcttcaatatcatttataattttcagactaacaaagtatcatcacgtttttctcactgttaaataaatgaaatatcttgtattatttaaaatatatagcactagtttttttattttattatccgtgtgtgtgtgtatttgaccacagaatgtgtaagattatagttcttagaaataaaagtcaagacaagttattaaaataattaaatataatatgcaaacttaaatgtaattttatgtagaccttttcttattctgagactgctaaatttcagctatgtgcaattttacaataactcccggaagaccatatcttattacggacatcattatgttgaaagtgatacaaatttagaaccccaaatgaaaaaattaaaaaaaaaatgtttattagccttactcacttaggctttcttgtagaggaaataagaaatgctaaagattttgcatagcaaagttgaagtctgttataacagtaggagagaagtaatatacaaattcacttgttgatatttttgaaagaaaattctaaaagtgtcctctttcaaaatatcagtactttagaaatgaggttcttttgttaaggtaacaaaattgccctggttatattaattgtgaaatgactatctaaagattgcaaataataattcaattgaaaacttaattatcaaaaaaagttaaataacaaaagtaaactcctcaacatcatctctctcttaaaaccagtgactcttcttatatttctactctcaaattaaaaatgtcatcaacaggcttagtggctcatgcctgtaatctcagcactgtgggaggcccaagaaggaagatcacttaaggccagagtttgagatcagcatgggtaactcagtgagatcccagcgctacaaatttttttttaaattagctgagtatggtgtcacttgcctgtagtcctagctattctggaggctgaggtgggaggattgcttgagcccagaaattcaaggctgcagtgagtaataatcccaacactgcactccagcctaggtgacagagcaagactctgtctcaaaaaataatataataaaatatgtcatcccctcaggcactccaggcagaaatatattattgtaaattattttttatttcaaccatttcatccaaagcagtaatgaaatccagcctatttaaaatcccaagcatttctagactatttgtttttctcatctttcctatcaccaatgcctgaatttaaattccccttatgtcttgtcaagactgttaaaatttttttcacctagtttccttaacttcagtataaatttcctctcacatttaatttactgcatactgtcttagttcattttgtgctgctataacagaatacctgagactgggtaatttataacagaaatgtattggctgacagctctggagcctgggaagtcctacatcaagcgactggcaccttgtgaggttttcttgttgtgtcatctcatggtggagggtggaagggcacacagagggccaaacttgcctttttataatgacaccaatcctacccatgagggcaggtggaaccctcatgacctcatcatcactcaaaactcccaccttgtaatactgttataatagcaattaaattttaacaagagtttctgatgggacaaatattcaagccatatcattctgccctggctcacaaaaactaatgttcttctcacatacaaaaatacattcattccatttctatagccccaagtgttccagtatcaactcaaaatttcaatgtctggagtctcatctaaattatatatgggtgagacccaagggttgattcatcctgaggcaagtttctttttagctatgagtttgtgaaattaatcaagttatgtgcttccaaaacacgatggtagaacaggcataaatagacatttccattccaaaagggagaaataagaaagaaaaaaggaaaaacaggtcccaagcaagtgcaaaacccaacaaagtaaacaatactaaaccctaaatcttgagaataccctttttagactatatcctgctttagggacacattgaggtggtgctgggtccctttaggacccaggcggttctgcccctatgggtttgcaggtattagctcatacaacagctcccacaggttagagtcttatatctgcatctctcccaggctgacgttgcatgctggtagctctacagttccagggtcttaggggtggctgtgctcccatggctgtaataggtgcagccctagtggggactctgtagcagctctgcccctgacacaaatctctgcctgaacctccacactgtccacagcatcctttgaaatctaggtagagaaagccatgctctcacaacttttgcatttttttgcacctggagaattagcaccctgtggatgctgccacggtttacagattgaactttctagagcagcagttatagccacacctgagtctgctggagtcatatcttgggcagctgagggttgcatcagaacacacagaatgctggaaacaaacattgaggcagccctgtgtagccctcatggtcctgaggacaccctaggcctctcttttgatatatttccttccctcaggccttggcactatgggtctgtgatgggagttgtgacacaagtaatctcgagagtgcctttgtggtcattctcccattgttctggtaatcttctctggctttgttctttttatactaattttcttatcaaatgttcccttcaccacactcattttcctgtcctggaaaatgctctttcattttccacgaaatggccaggttgagaattctccaaatctctaaactctgttcccattttaattatcagtgatgattttaaatgatgtctccgttttcacgttttactgtatgctgttaaaagaagccacatagcaccttgaatgctttgctgcttagacatttcttctgccagatatcctagttcatcacttaaattctgcctttcataaagcctttgggcatagacattattccgcaagattctttctccccttacaacagggttggccttttctacagtttacaatacctaattcatttcttccatctaagatgtcatcagggtggcctttaccgtccatatttttaacaacattctgattatgacaatgtagataatctctaagaagtaccagactttccttacaatggaacgtcctcttctgagccctcactaggtttgtccttaatgctcctttaatagtaatttaggtttttgtagcttgctcttccaaattcttccagcctcaacccactacccagttccaaaaccacttgcaagtattcaggtatttgttacagcaacaccctttgtccagtagtaattttctgtctcaatccatttcatgatgctgtaacagaatactgcagactgggcaattcacaacaaacagaaatgtattggctcgcagttctggaggttaggaagtacgagatcgaggttcaggcatctcagaagggtcttcttttggtgccatcctatgaaagaaggtggaagggcaaagagagggccaactttgtcctttataatggcaccagtcccacctttgaggacagaactctcgtggtttaatcactttttaagtatctcattttctgataatgttacaatggcaatgaaattttgacataggttttggaagtgacaaacattcaaacaacagcctaaactatagttagaagtatttctctaatacaccctgaccatactgatatgggaggagggcagagaagtgctgggaggagaagagtgggtccctgatgagcgctctaccctccagcctgtgcccatggacctaggtgaggacaggcactcctgccttcatggccaaatgttgcatttcccaaaccaccctggcccgccatgcccccatcctgtgcctataaaaaccccaagatcctagcaggccgactggacatcgagaggaacacgtcagcggaagaagacacaagtggctggatgttgaggggagcatgccgctgtaagagcacaccgatagagctggcaggcggcaggccatcaaccggtggaatgacgcggaatttggccagggaggttggaggagagcccgggcctctgagcggcaggactccacgggaaaaccatcttccttctggctcccccacctgctgagaactacttccactcacactgagcagcccgactccaagggaaaaccatctctcttctggctcccccatctcctgagagctacttccactctaaaacttgcacacattctccaagcccatgtgtgatctgattcttctggtataccaaggcaagaaacccggggatacagaaatccctctgtccttgtgataaggaaggagggctaactgagctaacacaagccacctatggatggctaaactaaaagagcaccctgtaacacacgcccactggggcttctggagctgtaaacattcacacctagacactgccgtggggtcggagccccacagcctgcccatccacatgctctcctcagaggtttgagcagggaagaaacgagccacatccccatcacacaccctgcgagggggacaagggaacctttccggtttcaataccacttcattacctaacaccttcgcctgaatctctgtggtgtacagtacatcaagcagagccaatgactgtgacagtgttttacgcggccttcctctatctgttcccaactatgaccatttcctggcattcaccaaataatctagaagatgtctgcacacaccatccctgtgctcacattattgtttttattgaccccatagtaactctcctagaaaagtcccacctcttgcttaagtgttaattgggtgctattttctcttttgggcattacccttgccctcttcccttcatcccttccaaggagcatgctccttcctggacactgctattctgtatgcccaccaatccctcactctccctaaggccttcgcaattgttgttgcttctttgattttcagtctaggtatcatttcttcaggggagatttcccagatgacccttttattcactcttatggtatgcctcacttctcctttttagcacttagaaaaatttcaagtaagtatttttgagtgcatttaaaaagttttctcagtgttttctaatctccctaagaattgaactattatttcattcactgttataaagtcaatgttgagaaattcatgtgtgtgtaaagatagtatctttagacaagttaaaatgtgcttccaaatttgctttatattagtacataatttctcacacttccctttttctattcctctagacttatttacttgcttcaggatagtttgggtaagaattcaaaaagaaataagtgcttagtcaatcttgaatacatacattaatttttttttcttttggtctgtgtcatcatcaacaacaaaaataatccttaaagtcaggtttttttttttttatggcagaaaagtagtatgttttagtaaaaattattttagctctcatcaaaaaaaggcctgaaagacagagtcataaaattttactgtaagccataacataaaaatagtatagggctgcttcaggcgcatagaaagaattgcaaaatcttgcccttcctgcttaggataagtgacaaggacacaagagaagaagataaaaggggagatacacaaccgtgtcttactctagcccaacaataagtaaaaactcagaggtataggtgtgctagaaactgctatatttgcaagaagaaacataaggaaatcagaactggtaaccagattccctaagagtagaccacacctcttgaaaaatatggcccagaagcaatacaacagggttagagaacaggtgatttgaaacagtagcctggagcagcaggtatgactcaaccaaatctaggatctggaagttcccacatatcatgatcaggagacctggaggtacagacaacactgaagacagtgaaattttggacaattagccacatccccaaatgaggacaggcagctactgaacctcagcagtctgcctcagcaggcaagaaatggattcaacagaccactcaaagtcaaagccagatagatagcaggtcatgagtccccatcattttcttgtaggaaacaaattgtgtaagtttctatttctcatttcccagtatgtgagatcaccttttggaaaataaatggggaaatgtaagacatattaaatatggaatatttatcagaaatatggaatatttatcagaaaggacctaagtcacttgtattcatcttctaaggatgccataacagaatactttagactgagtaacttacacaaatgtattgcctcacagttctggaggttggaagtccaaggtcaaggtgatggcaaggttggattctaggtgagggcttccttcctgacttgcaggtggccaccttctcactgtgtcctcacttggtctttctctgtgtatgtgctcctgatgtctgttttatatttttatttttctgataaggacactagtcctattggatgagggtccaccccttatgacctcatttaaacttgattaattccttaaagtccctatttccaaaaacagtcacattgtgggttaggacttcaacctatgaattttgggaaggatacaacttagttcataacaatcctaaaaggatataatctgaactaaaagagctgaagaaatcatcacatagtagttattcatgagaaatattagttatagaacataccgcaatcacattttgaagtatttaataaaaatggatgctagaattgcaaccctggaaaagctgtgtggcttataaatgaatccacaagtgcataaatatatatgtatgtagtctttttaaataaataaacatcatgtataaaaggcaaaagatcaaaaacagcctaaatactcatctatgggatttaatttaaatcaattattgggccttcatacattattggaatttttatatgctcagtgaaatgataagctttgacttcacgtattgaaatagatatatcaatctgtaatattgctatcatattttgtctagattgacaaagcacatgcctatcttctttattaatatgttaatttgtgacaatatataaattataaatgatgaaatgatatataacaggcttaacaaagggttacaggtgtcatctctgtggcaatattgtgatgggcttaagatcactgctaagagaagtagttaactgcagaattaaatagcctggctcagtagtcacaccagaggtatctttggcaagttatttaatcttaggttttataagcctcacttttttcatctataaatgggtctaataattgtatctatcttacaggatcattggtagacctaaatgttaatacaagtaaaacacttaggaatgtgtgggatattgtgtgcacttaataaatgtcacatattgtatccttttattatttttattcctattattattagatacagtcccaaataattttatttctggttttacaaaagacatctggtgcttttcaatcactgaaatcaataaagccgatacatatacaaaaattttcaaaaaaaattaggtaatcacaatttttctctctgcaattttactaacattatttagaaatgatgctattaaagggcattacttctactcatatagacacatgcatagccaattatttcgtctctttactcttcatctttaagcttgcccactgactgtcctaagtgtaacagacttaaacaacaattatttgcatgtgccaatagcagctaggggctaaggagtagataagagagtcattgcttatgtgactgaaggagacaaataatacgtggatgaggctttttaatttttgcccttgagagagtaatgttctcatatcttaaaagaaaatcgatacctgatattagatgcacataaactaatgatcaatacatcatgacagtagatttgtgaattctcatctaagtcaactaaacaaagaaacctattttatattgtgctatgttttgaatttgttccccaaagttcctgtgttataaattggtacccagtgcagcagtgctgagagatggaacttttaggaggcaatgagttttgagggctctgctctcttaaatgggttaatccattcatggattactgggtactgagggagtgggttagttatcatgaaaatgggtaagcaagtttggccatctcttgtgagctgttcttgccatgtaatcaatgccttacaccaccaagggactctgcagagtcaccattcgcaagaaggttctcatcagatacaacccctcgatcatggacttcccagcatccagaactgtaagaaatgtatttattttctttataagttactcagccatgagtattcagttataccaatagaaaacaaattaacacatagtagttttcaattagatataattaatataaaaagaataccaaaatccataaggcaatcagtgtgtaaaccccactcattctgatttcttcattatgcattccttcacttagatttaagttggaggaattttaagtgttgtaaacattaccattttaataacatgatatataaacctagaaggtaatacattaacatattttacagttgtttatgactttgtaaagaaaaaacaaatagaatgaacctgccattcataatctgtagttttatttcgagagctgggaattcatgggaagtttgtaactgcaatttgatcacctcccctttgaacctatctcagtcatgagtaccataatgtgcacttctttacttcagcagaagctgcttagagacaaattactttggtgctagattaaatgcacctcagcagctagactggatggcatttcactcccatgcagaatccttgcaagctgcactctgaccttctggatgacatcttctgcctgacagtcattattttctacctccagctccctaggacacctaagtggagcagttattagagttccacaggcagcataaatggccatatatatatatatgtttctgtggtcagaaattggaggggaggagatgaaaggaaaaaaagggctccgaagttgcttttattcatgactgcacctctccctcactgactctgaagctcactgttgttgatttccctgtgatccttgatttccttgtgatatttcaaaccactccagtctctagatggaaggtttatgttggccttgttgtggtactatccgatagaattttggatgatgtttctgtcctacaattctgaaaattgccattaaacaaaggttataatgtagttaaataaggcatgtaggaataaagcaaaatcaagtctggaggatgatacaactcttctgcatggttaagtatgttgtaacaatgattctagagggagagatcagtgtcgagtgggtattgatataatggtaagtaacccatttctccaaatctcttgacactgttcactcctgctttcttgtgccttatctactctcctcccacttcaactcctctcttaaaattctctcctcttcctccccttcccttcattatattcttaatgtttattttcattttttttcctggtgaagacatttaacaaatcaagaatggattccaagaatgctgaaagcttcctagttttttcctatatgaaaattatgcttcattctttcaataaaaacatgccagaaaatgtaaattattctgtaactgcattttttgtctagttctctggatttcaccatcacattccatagatggctattgtcttttatttgcaagggaatatactacttgttagagaaataagtaaatattagcttagatttctgcaccggaagtatgcagagctttgatctggggatgaaataaaatatgaagtatataattgggaatatgttggcataaaataagggactaataaatggtaccaaatattgaataaagtgacagtttcatcagcagtatcaatgttcaaggcatgtaaagaaattagaaggcttacaaagaaagtctatctctcttttcccaggtgtgtgtaacaaaagttcttgaataaacttggattttgctgatctggagttcaagcaagttcatgcacagctgctaagttaatggggcagttgcattatcttgctgtcacgtttatttaatgctgaaacccactgatggtaaattataccataaaattttaaattatattttacaatatagaaatgtgcataaataaaacacactgtgtaaaaaaaaataatctacacactgagagacagactcatactcaagcaattctctgctcctgctcctagtaactatcaaattcagcaactcaaccttttgttatcacaatatctttaatagaattgcttcagattaactttttttgtgtattttctttgaataatatattctagctgcctgttgggaaatatcagagactaaattaaactacacatcttctccatattcttttctccagactatatgcaaatatatttattttttattttctgcataatattacaacttttaattttgttagataagcaaattttggctcctattctcatgttctttctaccagctgccgtccattttccatcatttatgccattattttacatttaaaagtaattaatacctattttccatgttaattttaaatctttgtgctttgtgagatagtgtttgagaataaaataaaaatcatcatttaacttattaggattgtgaaaatgcaattcctttctgaagccatagagtcctgaaggttctttctactttctcattctatatattggcagttacaaaatatctcagttagttagctttatatttgtcatttcttaaatgaatttttgttttcctaagaatttttcctggcacttgctttgtttcccacgccctctttctctatctgctaaagtcaaacataaagttcttctagtgctctactactaagagtaatcctcacctttccagcattagatattgacagtgatgggcattaccagctttgatgcaaagcagctttgcctgagatggtagatgtgacactatgggacagatattgcatcctctacaagactacgggaagttttgcaataatgttaaaagactttagtagctacattcattcttctagcagacagggaggcttttggcaggaaatgatgccataactactgctttggataggggcgatatcatcaaagataacttaaaaagtaaaggaagatattgtgggttttatttgaacactgagcaaactagttcatggagtgcacgtaagttataccttggaatttcaaaaaactattaaggtattattttaagatgataagatctttgaaaaagcaggtcgtaataaacccagagaaatgtttggtgtgtgacagcctgtgtcaacataattttgcccaagtctctgaaacattagaaaaatatagaagcagtaaatatctattctaatggcttcaagacatttttccccctcttctctgcaatggcctctaattcaaattaatggacccccaatgctactgcctctgagaaaagctcattgaaacataagtaagtgtgtctcttactccatgatccaaccgaggctaatgagagaatatcatatcacacttgattaatttgaaagtgggcactggccaaattacctgagtcagagttcttgcctgaggtttttcaaatgctaccctagaagaaaagcaatttctttatggtgacgaaagttataagtcataaaaacactggcatgttcactggttatgtttcctgctatttagagaaaacagctttaaagtgaaagacagtaaagccagcatattgaaagaaaaataaattagtaccaagagagttctgattgcatttttgtccctggtccagttgttcataaatttgttccatctctgccatctgtattttggttgttacattttcattgaattctctgaagaaatgttcttcatttttctccccaaattagtttgagttaggtttatgtcagttggcatttaagaatcttaagtaatttgaaaaagttgaatgcccgtttatactcactaatgactctttattgaattttctcagagtaaagttgacaagtattgccatagcagctgaagttcacttcagattaaacacaatgtctttgactgtgccaagaatataattttatgttttgtcaattattaggtaataagtaattctgggattctgaggttggcttactcatcagtaatatttataatattagaaatttacttctaaagagaaaattcaccacttccgtaattttatagaccttgatttttacatggaatttgatgtgtttttgatgttttatgctagtatttatttaaaataaatatttaaataacttaaataaatatgttatcactatattatacaacttaaataaatatgttatcactatattaatgttttaaggtgtgtatatgactttaatgactgaatttttatccatgaaatgcaggcattaaaaaatggcatttagaacagagaaatgttagttgctccttactggctatttcactttctgaagtttcagttactttgtgttaaccgtaattcaaaaatattaaacagaaaattccaggactaaacaatgtataaaattttaaattgctgctgttacaagtagtgtgatgaagtcttgtattttcctgttctgtcttgctggggaggcgagtcattcctatgtccagcatgtccacactgtttatgctacccactcattattctcttggaagccatcttggtgatcagatcaactgatatgccagtgcttgtgttcaagtcacccttattttacttactaatgcccctgaacacaagagtagtgaggccagcatctggatatgtcaaagagaagccctaaagtgctttctttaagtgaaaaggtggaagttcttaacttaataagaaaagaaaaaaattgtatgcagaggttgctagcacctgtggtaagaacaaatcttttatccctgaaactgtgaagaaggaaaaataaatgagtgcatagtatatatatggttcagtactatccttagtttcaggcatccactggaggtcttggaacatatataaataagggggcactactatctatgtatgtactggtgtgcacacacagtcagcaattgttttaagggttgtttactttaaattgtaataataatctgttgtaataacgttacatgatccactaaatcatgttacacagaaattagcaaaaaacattttgaactgcttactatattagtttttaattattattccaaagatacaatatttaagatgacagttttattgaataatgatagaaatgctaatggcattccataaagtttatattagagcagtatattttaatttattgatctttcttatttctagcaatctactccctcccaattcttttaattttatacatcaatcaagatgacaagattggtaggcatatagacaaaatatctataggcactttctaaggtactggaagttatagcacatcatgtgttaacaaaaacaactttttaaaaactcttctatagcttcacatataatcgcaaggcatgtgaactttaagaaatcttatgatgtgatgatagtgacaggaggcacacaaattcctaggcatatagggacaggcccccagtgaaacccaactttcaaggcaaaaacagtggaaaacctaaaaaccaagctacaagtctagaaaaaaatccatggactgaactgagaacctctcttcccatttggtgcattttcctctgattgatcccctcccttcaccgattttacatatacctacccttccctaattgattttctacattgccatgcccatctttgagtggtacatttttttagccatttttgcttactcacaaaccaatcaccatgcactcccccattcagagcccgtaaaaaccctggactcagccacacttaggggactacctgccttcaggtggaggaccacctgtcttcagctagggtactgccactttagctcccctctctactgagagctgttctgtggctcaataaaactctttgccttgctgaccctccagttgtccacgtaaattcattcttcttggatacaggacaaaaactcaggacccacaggtgtgaaaagggctataacactataaccctccctcctgctcctggagcaatgggaggcctgagcaggggcactgctggcagcagaggtctccagctggtgaagcagccccccaaaaatcctccattactgatgtttcttaaaagagattatttgtgatcctgacactccaaaaattacccgggtctgtccatatttattgatgcaattttatgcacaaataactttcagccatttggacttaaaaagtaaaactaggctttgtgaaagccttgtttccagggatagaaaaatacttaactcctatggttagaattgccttgagctacaagtattaattaatcataatcaacagtgtttcagtgatgatgtatcaccagttatttctaaaaataacaaaaaaatacaccaataatatttaccagatgggaactaactttaatgattgactggattgggggtccaagctcaagagcaataagtagtatagtcagtcatacataaccattttgttcaaacttcctgcttacccttgcaatgataatttacctaatataattataaaagttgatgactgatggctgtaataaaaaatcaatctttgaagtagagaataatgacaaagtttccaagttctgtgatgaaagtacttagaaagaatgtacagtgactccatacattctgttatccattaatagctccttgttttgaccttaaacatgtctctctttgtcacataacaatgctgatgaaatccacttcatcacacagactcacaaacttggccttgttcaacttttcccttttcttctactcagacatttattcagttatctaggttggttatttttaactatggaatgttctaaatcagtttttctttcctagcttattatgattccctaatttaaattcctctttgtcaccattgggaatattgtaataatcccttaacttcccttccagataccagtatttctagtctttgttaccaataattcccatctttttggtctcaggactcatttataatcttataagctattaaagacctcaaagagctttttaaatgtagattccacccactgatatatgctgcattagagagaataactaagaaatatctatttatattaatttatcttaaaatagacattaaaattccattacatataaacatgatatcatatttttataaaataactatatgtttaatacaaaacatgaggagaagagaggtattacttaaacatttttacttagaggaaaaatggattctcatatatgcttctgtgttccacttaaggatatcatgtatggctctacacaaatacctagtttgaaaagctgtttttcctttttaatatccttttcagattactgtcaatattcttctttgatataacatcaaaactcaataagtggtagtttgctaataattatttgcaatgtggaattagaaagcagatcaacaaacatttaccctcttacattaggatctgttgatacatctgtgctttgactcttacctgcctgtgaatttgctgcattatacacgggtatttagaaaatgctggttccctgagttgtgtagatatcccaaatattgaaatgttttattatacaatatcaaaatcaggttcatttttattaagttcaataacaatatgatcagaaaagtattaagtatgagaaatgtcacgttcttggtggtgaatactaattttccaatttttttcacttgaaagctcaaatgttattattagcaacaaatactttaagttgtttacttcaaagttacagtatcacttatttttgagaaagtgttcttcagaatggccatatttgaactatcatagtttgtcagtcgttctttctagtaaagggtattttataaaaacagtaaagtgtcaggagtccccaagattacccctaagtttgtgatttacagaaattagcatatagtcatattcaatgctaagatgcattccagcaaaaggaaacaaagcaaagtcagccaagggggaaggctcaagaagcaaaatctggaggagaccaggcaaaagctgccaggatgtacttaagtcctccagtaatgagctgtgacatgtgggaagtgttgtctaccagaaaagctcattcagtctcaacacccgaggtttttattgggagctggttatgtaggcaacttctgcctagcacgtatcaaaattccggatgcccagagtgaaatcaagagtacagcataaatcacattgtttgtacaaagatttggggaatggtgggaacatagactaaattcaagttcccagatggcatccaagggccagcattgcaagcagacctttctaaggaaaagtagtcagatctgccgtatgtattattgctttcctgcacaagcagctaatccatcttacaactaaaaagttatatacaggtgctttttctcaatacaacagtgatatattggtctgcaccctgtactttacacatacttctcattttgtgacacgtaacattcaaagatgtgtacccaaagttgagattaaataaaattaataatttatttctgctgcttttaggaacttttcaggtaaaatggcagcttttgtttctgttttttcctactaagcatttataatgaggaagaatataatggctactcatataatttagtgcaaccgctttgattcatgttaaggcacaagcagttttattcatcattgcttttgcaacattactgcaaatattaacacagtgaaaaaggcaagaaacatcttacagtaattttgaccttgcagatcctttgaaagttttcagatactcacaagtctacagtccacaatttgggaactgttgttctacactacaggtacaattatctctgtgaaatactaatctgatatttttccttccattgtttaacaaacattatgactctagtctctatggaataataaccaggcattgtattgaattcttaacaaatgctgactttaactggccctttcaagataaattgtcccctatttctgcaaagccgtttctgctaatcattccataagcatagtggtctctcttcttagaatggtatccactatttatagattcttatttatcagtattcacattgatttatttaatgttatctccatctaggcccaatggaaatgtaatcaaaattatccgtaaagaactatttccctagcttattaatagcattttattttttttgagacagcatcttgctctgtctcccaggcaggagggcagtggtgcaatctcagctcactgcaacctccacctcccaggttcaagtgattctcctgcctcagccacctgaatagctgggattacaggtgcctgccaccacacctggctaatttttgtatttttagtagagatgaggtttcaccatgttggccaggctgttcttgaactcctagcctcaagtgatctgcccgcctcagtctcccagtattttgttttatttctttattcccctatttccaaagatagcttggcacccttaaatttctcaagattttctcaaatgtaagatgacagaaatcacaaccattatattaccttctaagctttaccttcctcttggtggtcccaaacttcatgtgtaatgccatgaccatttaagcagtcatataaatcagacaactgaaatccactttaccccacaattctttgcaaatctccacctgtttgaccttcttaccatgtcttggatctacccacttttctcttttcaccaccattctgttctatacattgtcataatctcccatttgaactactacagtaacctcttagttctttccaaacatctctccttgccctcaccttcaagcactcctttgaaagcttatatcatagagatatatttaaaatgaacaatatgttcaaattcacctcatccccgtacccacaccttgcttaaaacttcaaagtagcttaccattgatccttagtgtaaatataaaaagctttcaatataaatataaaagtccttaacatgaatataaagttctcttgctctgatcactgtctacttacaacaagattttgtgttcagttttaccttgccctctgtatcccattgtcccattggcttgcccaggttttcgatttgttcctcaattacatcatgtttcctcctacacaaagcctgaacatgtgctgtctagaaattatttctaattttatccacatcattctcctatacattgttaaaaatattcttcattttgatctctggttaataataactaactcaaatatttgaataatgcaattttccccttccccgctctcacaatttttggtagcacttcttcaatgtgagtttttttacttcacttgtaagatttgttgattaatatctattttcccaactgaatttttatatccatgagttcaaagtgcttgtctgattttgcctccagtgttaccaaaaactcatattataatacctgtctcacagtaagtgctgaaaaatatttgtcaaaattataagtaatgataaagctacagtaaagaagacaatgtgttattggtggaagaatagacaaaagtttattggaacaaaatggagaatccaagaataaactcacataaattgagtcaactaatcttagaaaaagagaagaggtaaaattgtcagaaatgttggaatcagagtgactccatattgagtgagggctaggaaaatgaggctgagactcgctgggctgcattcccagaaacttagatatttctagcctctagatgtttacggttcagggagaagattgataacgtttactaaacagagtgtccagatatcccgatatcttgagaacagaagcattcctaattttgctttagagataataacatcaattcttgcaaaatacagtaattaagaaaattggctgggtgccttggctcgcacctgtaatcccagcactttgggaggccaaggtgggtggatcacttgaggtcaggagttcaagaccagcctggccaacatggtgaaaccccatctctacacaaaatacaaaaattagccaggcatggtggtgcttgcctgtaatcccagctacttgggaaactgaggcaggagaatcacttaaactcaggaggcagaggttgcagtgagccaagatcgtgccactgctctccggcctgggtgacagaggttgcagtgagccgagatcgcgccactgcgctccagcctgggtgacagagtgagacttcatctcaaaaaaagaaaagaaaagaaaatgaatcctttattacaaacccttgtagcaaagcacatctccccatgatctttttttgtttgatatataatctagtattgtacttaaggtggatgcgttcctcctctgactttgggaatgccctactctgtctatggagtagctgtactttcacgacttgatgttcttaataaacttgcttttgctttgcactgtggactcacctgaattctttcttgcacgagatacaagaaccctctcttgggttctgggtcaagatgactttcctgtaatctttcaccttcctcacaatcatgacggaaggtgaaaggcacatcttacatggcagcaggcaagaaacagaattaaaaccaagcaaaacttcaacacatattagcaacagtgcatcaaaatgaaactttcttaaagttcatttactgttacgtagcatgcaattatacaatatttcctatgtatccaaaatgtcactggcttctgctcccactggattgattaaatatatttaacatatatataaaatatgtatagtttacatacatataaatatatagtagatgcttgaagaacacaggtttgaattgcacaggtaccattatgtgtgattttttttctctgccatccctgagtcaccaagataaatccttccttttcctcctcctcttcagactaatcacaatgaggatgaatacctttagggtgattccctttaatttagtgaacagtaagtatattttctcttgcttatgattgtcttaataacattttcttttctctagcttactttattataagaatacagtatacaatacatataacatataaaatatttgttaatatgctgtttatagtataggttaggcttctggtcaatgataggctattaatagtgaagtttgggaggacttaaaagttatatgcatatttttgatggtgtggaggtcagcatgttcacccatgttgttcaagggtcaactacaaacctgatagccctttgtggatacttgcttctacttagcccattgtatcatgtccttgtggtgattgtgctcattcattatgagaatttcttcagcttgaagaacacctgtttctgaatcttctctgagctttagaaatattagcaagggagggaacttagatggttctgtccctgatctaactttcattacgaagttctggatcagagagttcctctctggaggattacgcgtcacttaaccgatcattgcttccgcaatcacagactcaccaaggacagtcattatacttccttctggagtaatatcccttctccattaagattcgacttctgccctggagactgaggaactagtaatcctgtctcaagattgggcgattaacttcaaattgcttttcaacactaggttgaaatagtcttccctgagaaccttctctttatttgctcagaggttgataagacattctagctgttccctaatatattttcataaagcaagcataagtgatatcaaatcattatctcagggtcacatactggttaatgtcctccatatcctgttaatttaaggtgaaagtgaattttatgtctggaaactgttgtatgtctttggtatcttccttctgcagtgtgtctgaattgtaaggtcagaacttaggtcattgaacttgttatataaggccaccaaagaatagtaattaaaaaaaactagcagttatcttatttgtaaaagaagacagcttggttgatgatatttttgtaccattgacatctagagtttgaatatatgtgttaaatttgctgctactgcagcacttgaccctattcactaggtgatgtcaattttctgattctaatactattgctgacttgagggggaaggttgactatttccatacagtttgacctgtgatgattttaaattggaaacagtgagtaagactaaaatcatgggggaatactttttttctaatattctctagtagtcatacgtaaatataatagttctaatgatttagtcaaaacctaattaatgtcagtaatggagaacaaatgtaactaataatgcaatcttatagacagtattattttaagcttcactgtacatatggatttctctttatgtgcctatagtcatatgtttaaaagctttatatttataaaaaagtgatgacttaatgtcaagttaaaacataatatttgagcaatacttcactattcccatctcatcaaacatgtactttttcctctggctctccacatccattatggctctcttgactttttttcctttgtcaaattcattgttattatactaattattattatgacatagcttccttgatatgttcttgtctgttacctctcatctaatttgatctatatatttaccaaattaatgcttggtacttcttagtattataacctttatcaagcctcttcaccactcagcatagatatatatgtacacataaaaacacacatacagtggcttttcatttcttgttaatttcaaattcttcatactcttactaactctctgatataaacattcccttcacattccttatgtgataaacacacacccactgtgataaacgagcaaagtttaaagacctcttatctttgtttttctggtacacaaacctctgttttaatttattactttgtcctggaatgcttttccctgaattttgaagggcaaattcaatacaggtattaccttgggaaagaccccaagagctattgttcctttttgagacattcatagaacttttagttctatgctttaatgccatttatattctattttgtaatttaattattattttgtgtattaaaatcatcttttttacttgattaccattgtagaaaagtttttattttcttataattttgtagtactgtgcacagtcttctataataaataagacttatttgttaaaagtcccttgaacaatgagtgaaataattctctttagttaaaaggcagactatatttctttattttgtaagaaaatggaatcctcttacaaagagaatgtctgaaggaggccactgatttttatttctttgagatattattttacccaaaatttcagtacagttttgccaacagtaactctaaaagcatcttctaatgttggtctctttattatctccagttccaaaatggtatcattctttgataaacacagattttgagaaacaaaacatttgaatgtggagatggagaaagacagagtgttcaaggaatatatattaatccgttctcacactgctaatgaagacatacccaagactgggtaatataaaggaaagaggtttaattgactcacagttctgcatggctgtggaggcctcaggaaacttacaatcatggtggaagggaaagtaaacatgtccttcgtcagaaggtggcaggagatagaagtgccaagcaaaaggtggaaagtcctttataaaaccatcagatctcgtgagaactcactatcatgagaacaacatggggggaaccacccccatgattcaactaccacccatggggaccatcccgtgacatgtggggattatgggaaccacaattgaagatgataatttggttagggacaaagccaaaccatatcacaatgttcttggctcaatgaagtataaaccaaatttatttattgtgatttaggatgtagggttatatcctaggaaaagaatacataaacaatgtttaatgttttatccagttgtcattgttggtatgaaaaagaaacctatcttttttaagtattaaggagagcaagaaactaataatattttgcagctagtagctctgattatctgtggagacctcaaaaatggcaaaatggcctcttaaaaaattgatatttattaagactatatatttggttggtacaaaagtcattgtgatttttgctaaacatctgttgtcacagatctcaaattgcttactagaagttataaacaacatgaaattatgctatttatttattatgccaggcttctccagaacatgctaagtaaaactggtataactttgataattttaagctggaatttctcaaatctacttaagattgcaatgattcctaaaaccatcttttttttttcaagaagagtgcagccagcctctgggtttattttatcagatacagattcagaatcagccttcttagaggctgaattgccacatgctactgaattaattaagacactgacttcagtctaagagcgttggattcagtggaagcacaaatggccctgcggcagcttttccctgtggctatcatagttctccactacgtttctatcttttgcatcgtatcaatattcccatccctctcagaagtggattaaaactatctctttgcaataatgaaattaaatcacctaagaagtttgcatcatttttgctgagaagtgaaggagaagcatttgttagcactaatctgaaagtttctagtgatttattaacattttctttctttgaaagtacgactgaaaactgaatgacaaatgatttctgaagattggaaattcaggcacaaggctttttcagggctattcccaataatacaaggtaaaaaaaaaaatcaaatttcttaactttttaaaaccaatatcacattttccaacatgatgctaccatctattttttaagacatcttcctactccagggcagaaatataattggaataaatctgcaaacattccaagactgctgtatcaagtctgcaagaattcacctcaaattagataaaatacatgtaatttgtgatgcctctgttgcaaaagcaaaaagaaatattccgtgtccctagggttgtcaattgttactgaattttgatttatacaaatataaccatagcagaaccactttgtcacctagtggaaaatggctttccatggtgtgaaattcacttaaatttggatacttttgtaacatctagcaattattgacttttccagtttttgcaagtgtatttctttaaacacaagtggtcttttctatctttccttgccacttagaatgggaaaggtgttcagcttcagattttctggttatactttttaaatatttatttttttaattgaaaaaggaaattttatatagttatgatatatacataaatatgtatgttttgatacatgtttatattatggatggtgaaatcaagctagttagcatatttagtacctgacaactatcattttatttttgtaatgagaacatttgagatctactatgagcaatctttaaatacacaatacatttctattaactatagttatcatgttgcacaatagatctcgtgaacttactcctcctctctaatttaaattttatgtcttttggccaggcacggtggctcatgcctacaatcccagcactttggaaggccaaggcaggatcacatgaggccaagaattcaagaccagcctggacaatatagcaaaactctatctctactaaaaatacaaaaattagctgggcatggtggtgcacacctgtaatccctgctactcgggaggctatggcacgagaattgcttgatcccgagaggtggaggctgcagtgagccaagatcatgccacagcactccagcctgtgtcacagagtgagactttgtatcaaaataaataaatgaataaatttcgtatcctttaaccaaaatcttctgcatttcccattctccactcccccagtccctgataaccacttttctaccctccacttctgtgagttctactttcacatataagtgagattattatgcactgtttgtctgatgatacttaaactgcatttatctactgagtaacaatttcatcaataaactgaaatgaaaaagaaatttaaagctgtggctgatagttcaggagtcatgacattccttactatctttatcactgtgaatttatcacttttactcattaaaattctcttagacaaagaaacacatatatatatgcatgcaaatcaaaggaactaagtatgaagagcaaggaaaaaacactgcagactggttggctaggcttgaattctggtagcagtcacatgcttttggaagactttgtaatttcattatgtcttagttacttcatgtatcaaatggagaagataatagtacttacctagtagggatgtgtagagaattaaatatgttaatggatgtaaagagattagaatagtttatggcacacaataagggcataatatgtgctacctatttcaatttatatcacagggaatgaaactctagaatatttgggtctgctctcattgacagcacattagtctaaatacctgcaaggccggtaacatgctgataactttaataatgtgtttctgtgaatcacagaatatgctgcatcgatttggctgtaagttgtaattctcctattctatcaaattgtatacttcactgagtgaactcctgtgtattggaccatgtattaaattgagtgggacagggttaggggaaatatgtttaactttcttaacaagtaagtcacaaacctgaaatcatccttcactttatattgtctctttccccatattaaaaattttactagatcttattgattttgccttcaaaatttattttaaaatgtgtttatttccatctttttctgaagaccacattatttcttgctgggaacagctgtaaatattttctccatcttagagtcttcctaagtacaaactggatatccatattgctgacagagtcatctctttaatatcataatcaaatcattttctctccttacatagatgtattcaggaatttcacattgctttccaaataaacgtaaaagcctgtaacatttcaaacaaaacctttatattttggtcctataattttaggcttatcatctgtcatgttcccaaatgtttccccctttctcttaatgacccattcctggctactttttcttctaccttcttgtcctttgtggatactcttagcagtagcagtaataattttcatgtcttacctgtggacaccattatacttgtacttcgaggctcatatttttatttttaaccctctagctcagaatgagttagagctttgatttatatttttaaatcactctgcatattagttcttattagttctattagtttctatattgtgaatgggggaaattatttaccaaaaaaaatccatcattcttttgagggcaaagtttgaattttgtccttagaatccctaagtttaacataatccattgcactaggagacaatcactaaatgattgttgatcaagggactcattcaattttatattattaatacttgatatcagatttaaccccctgtcttatagctatctgggtttttcctgagtcaagtgcctagggtttaagaatattaatttttctacagtcttaacttgctgagattttatgctttaaaatactttccctagatcagttttctatcttaaggttttagaaattgaattttcaggtttgagctgctgttcagtttccctccttcacggatcttgaccatttcttttttttttctaggctgaaatgtttcttcagtccttaggttatagccatgaatgatttctttgggtaagtaccctatagatacatctaagtggtattaataagaattcaatatcctaagtttgtgagcacaaaagtcattgtttaaagcctttgagaggctttaatattgaaaacattgtaaagcacagaagaacatactggagaaataaacataattattagaactacatagttttctatgggaaaagagtgacaactttgaatttcttatttgttatgcactcctaagaatgacttaaatgttttttgaattgcttactaattttacttttgaattaaaaatagttactttcattgtggtttttatttgcatttctctgatggccagtgatgatgagcattttttcatgtgttttttggctgcataaatgtcttcttttgagaagtgcctgttcatatccttcgcccaattgttgatggggttgtttgtttttttcttgtaaatttgtttgagttcattgtagattctggatattagccctttgtcagatgagtaggttgcgaaaattttctcccattttgtaggttgcctgttcactctgatgatagtttcttttgctgtgcagaagctctttagtttaattagatcccatttgtcaattttggcttttgttgccattgcttttggtgttttagacatgaagtccttgcccatgcctatgtcctgaatggtattgcctaggttttcttctagggtttttatggttttaggtctaacatgtaagtctttaatccatcttgaattaatttttgtataaggtttaaggaagggatccagtttcagctttctacatatggctaaacagttttcccagcaccatttgttaaatagggaatcctttccccattgcttgtatctcacaccagttagaatggtgatcattaaaaagccaggaaacaacaggtgctggagaggatgtggagaaataggaacacttttacactgttggtgggactgtaaactagttcaaccattgtggaagtcagtgtggtgattcctcagggatctagaactagaaataccatttgacccagccatcccattactgggtgtatacccaaaggattataaatcatgctgctataaagacacatgcacacgtatgtttattgcggcactattcacaatagcaaagacttggaaccaacccaaatgtctaacaacgatagactggattaagaaaatgtagcacatatacaccatggaatactatgcagccataaaaaatgaagagttcatgtcctttttagggacatggatgaaactggaaaccatcattctcgcaaactatcgcaaggactaaaaaccaaacaccgcatgttctcactcataggtgggaactgaacaatgagaacacatggacacaggaaggggaacatcacactccagggactgttgtggggtggggggagtggggagggatagcattaggggatatacctaatgctaaatgatgagttaatgggtgcagcacagcaacatggcacatgtatacatatgtaccaaacctgcacattgtgcacatgcatcctaaaacttaaagtataataataataataaaagtagctactttctgtgttcaattgcctcaacaattgaatatttttgttgaatattaaattacaagatgcttttcttttgtgtttggaatacaatatgtctcaaatatatctcaaatgtatccaaaataccatttgagatataatgagatatataaaatggtattttagatacatttgagatatattatattcttttaatatttgatgatttgggggctagagcttggaaatgaaaattacaatctaaaatgtccatttttactttcctccaatgccagtggtcttcattaaggtataggcaactgactgctggactttaatcagatcataagtccttagtagtatgagagatgcattgggtactttaaaattggagaatacttttattttttccttatttgaggaattattaattattgagtaattttatcaatatttgagtatttactaactcaattactcaaatatttatttttcacacagaatgtgttaaatccttttgaaatcttagcaaaaataagcctcgtctcttgaacgagaaattgattttctctactaacaaatggaacttgaacctcgatatgcgtgagttcaattttaaactccaaatctatgatatttgagtaagtgttacgtttgccaaattgtgttcttccatccctaaagctattagttccaagtcctgccaataggaagatcaaagaaatacaaagaaaaaaatcaatatatgattgagcttcttcaccccatcttcattaagagaatacatagtataatttaattctgcagcatatatttgaaaatggacaaccaaaggtgctactaaaattgagcattgtctgattctaactcttttggaaagcggtctttttaacttggccaagtctataatgatggtaaacacactaaacacacacacacacacacacacacacacacacagctatataaaacctagtgttgttaataagaataaaatgaacaccaaggaattcctcatccaaattaagagatcccttatgttgatgtcagtccctttctctgataatatattcttcctcctcaccagggttaaacactatccttctttttcctttaatcattctgatttttttcagtttttcactcatgcatttttttctgaggcattcattgttaggtatggcatggctttaaattttgtgtaagttcaatcatactttatgtattctgttattttcaccttgttgctctgtatagttttatatagttcattttcagttctgaatactactctactgtatcaatatagccaaaatgtcttctcattctagtcttgatggatattgggatatcctcagtatgttactaagataaacaatggcactatgaattatattgtgctttcaacagaatacacatgcataaatttatctcaaccaaatacttataaatggaattgctccactttactaagagttgttaaagtattattccaagaacatttcctagcctactctttacatagctgtgtataaaagctctccttgctgtgcttacttgtgaatattaggttggtgcaaaagtaattgtggtttttgctgttatctgcaatggcaaaaaatgcattacttttgcaccaacctgaaatttaatattgtagattgatatggtttggctgcgttcccagccaaatctcatcttgaattgtagttcccataatccgcaaatgtagtgggagggacgcagtgtgaggtgattgaatcatgaggtccgttactcccatgctgctgttctggtgatagtgagttctcaggagatctgatggttttatagcaggcttttcccccttttgctctgcacttctctttgttgctgccatgtgaaggacatggttgcttccttttccaccatgattgtaagtttcctgaggcctcccccaccatgctgaactgtgagtcaattaaacctgtttcctttgtaaattacacagtctcaagtatgtccttattagcagcatgagaacaaatacctagatctttaaaacgtgttgaataacataataaaattgtatctcagaattttaaaatgaatctctcaatttaattgaacagaaattcatttttatcacatcattttatgatttaatacatgtatgatacttttaaaaattttattttttaaagctgagttttctttcttattaatcatagcaatactttacatattcttggtgtaagtacattgtgatgtagatcaaaaacatcttctcctaatttaatatttttaaagtattccattgtaaagcttttttttttttttttggagacagtctcgctctgccgccaggctggaatgcagtggcgcgatcttcgctcactgctaactccgcctcccgggttcacgctattctcctccctcagcctccctagagacggggtttcaccgtgttagccagcatggtctcgatctcctgatctcgtgttctgcccgcctcagcctcccaaagtgctgggattacaggcacgagccaccgtgcccggcctgtaatgaattttatttaaaaaaaaattgtaactttatgctcaaatcaattttactttaaattttaatggtactattgaagcatttgcctaggaaacatttgtgcaatatgtagatttctgtaattatttattcacttttcctttataatttgcattttcagagtcacatttaagatattatttcctacactaaagatttgaaaatattttcttgtgtttttaaaaaatgttcttaatgtggtattttgcattagtgtattgaatatccctttaattgatttttgactatggtataaagtatgaatcgaaattaatttatttccatattagcccattttcccaagactaagaaaaatctgccctttcactacaaatataaaatattcctgtgttattgatcaagtacacgtatgtttctggacttcttattgtgttccattagtctatttatacttatatacagtatattactgtgtagtatactatatagtatactatttatatagtataaataccatatatactatttatagctgcatatagctttacaatgagttttgataactgacattgaaataacttacaaagacttattgtcttctttttcttcttgaagtatgtttcagatatagcttgtcaaaggcacttccacatcaattttagaattatcttattaagaaactctctcacacacagacacacacacacactgtcagtattaagttgaaattcagttgaaatctcactgagtctacatgtcagtttggagaaaactttcatatagtaatacagtacatgaagatgtatatccttctatttaattacatcttctaaagtagaaaaattttatatgtttttctaattgtttttaaaatatttcgtgataaattaatacctgtcttgtgctgcataactgcatatatgatggtggttccataagattataaccaagctgagaaattctcattgcctactaatgtcgtagctctcatagtgtcttagcacaaagcattgtgtttatgttaatcctggtggatacaaacctactgtgctgccagttacataaaagtttagcacatataattatgttcagtacataatacttgaaaaccaacaactatgttactggtttatgtatttaccatggtatactttttattgttagttttagagtgttcccttacttattaaaaaaaaagttgactgtaaaacagcatcaggtagatccttcaggaggtattccagaagaaggcattatcacaggagatgacagtttcatgcctgttattatctgtgaagagcttccagtgggacaatttgtggaggtagaagacagtagtattgatgattctcaccctctcactctgggtaggcctaagttattgtatttgtatttgtcttctttttaaacaagaaagttttaaaagtaaaacaaagattaaaaatataaaaaatagaatttgcatataaagaaataaaatatttttgtacagctgtacaatgtgtttattttattttatttttttttttttgagatggattcttgctctgtcaccaggctggagtgcagtggcctgatctcggctcactgcaacctccacctcccgagttcaagtgattctcctgcctcagcctcccaagtagctacaattacaggcacgtgccaccacacccagctaagttttgtattcttagtagaaacgggattttcactatgttggccaggctggtctcgatctcttgacctcgtgatcctcctgtctcggcctcccaaagtgctgggattacaggcgtgagccaccacacccgactgtgtttttgttttaagctgttattgtaatagagtcgaaaagttaaaaaaaagtaaaaggttcgtaagtaaaaatgttacagtaagctaaggttaatttattattgaagaaagaagtttttaaaataaattttgggtagcccaagtgtacagtgattacagagtctaccacggtgtacggtaatgtcctaagccttcacagtcactcaccactcactgacttattcaggtcaatttccagttctgcaagctacatttatggtaagtgccttacacaggtgtactgttttttattttatataccatatttttagtgtacttttttgtttaactatatttagatacacaaatacttaccattgtgttaaaatttcctccaatattcagtacagtaacatgctgttcaagtttgtagcctaggtgcaataggctatgccatgtagcctaggtgtatagtacacgaaagcatttaggtttgcttatgtacattccacaatgtttgcacaatagcaatgcatttctcaggacatatccccattgttaggtaatgcttgactataattacatttttctattttaataatagttttatttttcatctgtgacaggtacatataaatgcaacaaatttgcttgttagatcttattactcagactcctttccagattcctaattgtttctaattatttacttatagattatttttaatttttatgtgaatgattataacatctatgaaatatgtataagtatcaggtattccttttcactcatttcataactttttcatgtcttgtgcttgcagtggtatcccagaaaatgttccatagatgtgaaaatgacaaacacacttacatatataggcagtatcaacagaattcctgcaatatttcaccattaaatgtgatgtttttgtcattattgcttttgttattgttgttttttgtagccacaacttatgatattgactgaattcctttctaattctagtttctaaaaattttaccataattaagatattttacttttacatgactttttggcatctattgaggtaatcattagatttttctccattaacttataaatattatgaatcatactactttttttaatgtacaaaccttgcatttctggaactatcccatttggtcataatattatcttttgaaatacatttttagattttattagctaatatattcagaggcattaattttgtggcattaattttgatgagtatgtacaaagtgcttttaattttttctcaagttctgtttttcttgtatagagttaaaagttatgctaacataaaatgagttggagaattttatttcttttttttggggggggttaattttgtgaatttagagctacttaagtctttaatgcttaacagaactgcatggtaagattatctggctatggaattgttccttatgggtgatttgtgattgctgatacaaagtatttaatcttataagataattaagagtttttatgtcgtctttgtttagaaaaagttgtgatttttacatacataaacaacagtcaaatctactgacataaacgtattatttctttttatttaccttttaaatatctacaccatttataattatgacatacataagctctcagtattttctatttctaatattgtttatttatgttgtctttttagtgtgatttaaatcatttttaaaatgttttttcatttcttttttggttttccaagatccaacttttgtttcttgatctcttctactgtatttttaatatcttttgttttaattctagggtataactttaatatttacatatttatatttattccaaagatcattttattgttatttgtctaactagtacagtggatcttttgatcattaatttttagttttcctttcttcctaccataagtaattaggattaaaaatgtactttactgttataagtagagaaagctagaagcaagttcaattggattttttaaatttagccaaaagctgcttccttatatatgtttggcctaaagatttctccatacatagtgaactgtaactcaacctaatgtataaaaagactgtaacctactgttgtgtcagtcacagagtttcaggcaatcaaaggtggccaactgttctaactgccaagctgtaaccaatccagctgtttctgcacctcacttccattttctgtgcatcactttcctttttctgtccataaatcaaccctgcagcagggttgcagcctctctgaacctgttctggttcaggggctgcccaatttgtaaatcatattttgttcaattaaactctgctaaattagtttgtctaaggtttttctttttacagattggaggaacaaggtagcagaggcctgataataaagggctttgtggtcattaaaaattcataatttacccaagatggtgacaagtcaggaaaaggttcatcagagaaattatatgagcagatctgtgtttttgaaagatcattatggtttaatattgagagaagaatgaaggatctaaactggaagtaaaaaattcaatgtttcagaagatagtaacctagaatattgagcgtgtctggaaggtggaaaaaactacatgttggacattaaaaaaaaaaaaaaaaaaaaaggccaggagcagtggcccatgcctgtaatcccagcactttgagatgctaaggcaggtggatcatctaaggtcaggagttcaagaccagcctgaccaatatagtgaaactctgtctctactaaaaatacaaaacttagctgggcgtaatggtgggcacctgtagtcccagctactcgggaggctgagacaggagaattgcttgaaactgggaggtggaggttgcagtgagctgagatcgcaccactgcactacagcctgcgtgacagagcacacacacacacacacacacacatacacacacacacacacagacacaaaagtctcaccaaattaaaaaaaatggactataatttagtgattggctggaagttggtctgagaatgagaaaagaaaattgctaactcccataatcctgactggacaactatttgtattgcattgtgaggccatgcactgaaggcatagaaacacaggaaaaatgtgaaaaatgttgtggtgaaaagatggtgcatcctgtgtaggaagatgtttgagttttaggttactgtaaattatggaaatgcaataagcatttggcaatgttggcagagaggtaggaaagtaaccactggctatacatttagattctaaagtaatgaaagtggaaatcttcagaataataagaagagattagcattaagctctgagggatatcaatgaaggtaagagctgaagaagagagtttgcagagggcagtgaaatagagttactcaatacaagataaagaccaggacagtgtggagccatgagaacaaaggtagtgatatggtttggctctgtgtcctcacacaaatctcatcctgtagctcccataattcccatgtgttgtgggagagaccagtgggagatgattgaatcatgaagaggagtctttcccattctgttctcatgatagtgaatggattttacgagatcttatggttttaaaaacggtagtttccctgcacaagctctctttttgcctgccacaatccattcaagatatgacttgctcctccttcccttctgccatgattgtgaggcttccccagccacgtggagctgggagttccccattaaacccctttcctttgtaaattgtccagtcttgagtatgtctttattggcagtatgaaaatgaactaatacagtaaattggtaccagtagaatggggcactattgaaaagatacctgaaaatgtggaagtgactttggaactgagtaacaggcagaggctggaacagtttggagggctcagaagaagacagaaaaatgtgggaaagtttgggacttcctagagacttgtagaatggctttgcccaaaatgctgatagtgatacggacaataaagtccaggatgaggtggtctcaaatgaagatgagaaacgtgttgggaactggagtaaaagtgactcttgtgatgttgtagcaaagagactggcagcattttgccccagccctaaagatttgtggaactttgaacttgagagagatgatttagggaatctgggggaagaaatttctaagcagcaaagcattcaagaggtgacttgggtgctgccaaaggcattcggttttataagggaagcagaacataaagttcagaaaattggcaacctgacaatgcaatagaaaggaaaattctattttctgagaagaaattcaagctggctgcagaggagcggaatgttaatctccaagacaatgggaaaaatgtctccagggcatgtcagaggtcttcatggcaccccatcctatcaaaggtctggaggcctaggaggaaaaagtgatttcagaggccaggccctgggtccccatgctgtgttcagcctagggacttggtgctctccatcccagctgctccagctgtggctgaaaggggccaacctagagctcaggccatggcttcagagggtggaggccccaagccttggcagcttccacgtggtgttgagcctgccagtacacagaagtcaagaattgggtttgggaacctctgcctagatttcagatgtatggaaatgcctggatacccaggcagaggtttgctgcagggatgaggccctcatggagaatctctgctatggcagtgagaaagggaaatgtgggattggagcccccacacagagtccctaatggggcaccacctagtggatctgtgagaagagcgccaccctcctccagaccacaggatgatagatccaccgacagcttgcatcgtgcatgtgcctgaaaaagccgcggacattcaatgccagcccatgaaagcagcttgaagggaggctgtaccctgcaaagccacaggggcagagctgcccaagactatggaaacccacctcttgcatcagcatgacctgaatgtgagacatggagtcagaggagattactttggagctttaaaatttgactgccccactggatttcagacttgcgtggggactgtagcccctttgttttggccaatttctcccatttggaatggctgtgtttatccaatgcctgtacctccattgtatctaggaagtaactaacttgcttttgattttacaggctcataggtggaagcggcttgtcttgtctcagatgagactttgcacttttgagttaatgctgaaataagttgagacttttggggactgttgggaaggcacaattggttttgaaatgtgaagatatgagatttggaaagggttaggagcagaatgatatggtttggctctgtgtccccaaccaaatctcatcttgtagcacccatacttcccacatgctgtgagagggacccagtgggagatgattgaatcatgggggcgggtctttcctgtgctgctctcatgatagtgaatgtgtctcatgaatccagtggtttttacaaaggggttttctctgcacaggctttctgtttttcctgccgctatccaagtcagatgcaacttgctcctccttcccttctgccataattgtgaggcttccccagccatgtggaactgtgagttctccattaaacctctttcctttttaaattgcccagtctcaggtatgtcttcatcagcagtgtgaaaacagactaatacaggcatctgtgttttcagaaagataaagtggcaaatagtattaactactgcaataatttgaacaatattcagtatataatgtttataaaacacagtgacattggcattctatttgaatattttgaaagtaatttcagtggaataagtaagaatcttcatgggaattggataagaagtgaataaagctaagaaaatggaaataactactatgagcatcattttcaaagacgtaggctttgaggaaaatgggagacccatggcaatcgacggaagagagtttggtggtaagagagggcagtttcagagatatttgaaaatttttgaatactcatggaaataagttttagaaatgggaaatactgaagacactggaaaggagaaaaataatgaattgagtcgcttttgagatggcagtagatcagatatagaaactgagtggaggaaaaaccttgtacatgatgtaagttcattcatcaggtattggttttgtttatgtgaagagaagagcatttcttcccagttatttaagccctttctggtgaaggcaaagtcatctcccaatagtattgaagaagtttgaaaattttgaatcatacggtgagtgtagaataaagagttattgagaactagagagtactgattggaaaaaatacagtagggttgatgagaaatactgagggtctgcttgaagttggtgacaatgaatttaatctaaatgacttagtgtttgtctctagcaccactcaacatcttaagtgtgtccacaaagataaaaataattggattaatcctgtatgagaaaaattattctatttggaaggacatgctacctatatttagaaaaataaatatgggatttgtcaacgatagggatacatagaaggacggtatgtattgggggtggaaaacttggatcttgagtacaattaaccacataaattgtaagaaatgatgttatggtccgtcagtttctattaatttgtcatttaaaaagtggatctgttgaagacaagaagcttcatgttgagctaaaggtgtagaagtataaaagaaaatagaaaatattgccattgcaaacattaaatcaaagcattgaaatttagtgaattagaaccatttctaagtacattaacattaaattcactggaggttttagaccagctttgaatactgagtaatctggttaggcaagtaccatagtcttcaatacatacatggggatgccaaaaagatgagtagccagaaacagagaagttgtcaatattagtacaccaaatagagtttactttttttttttttttttttttgagacggagtctcgctctgtcaccaggctggagtgcagcggcgctatctcggctcactgcaagctccgcctcccgggttcgtgattctcctgcctcatcctcccgagtagctgggactacaggcacccgccaccatgcccggctaatttttgtatttttagtagagacggggtttcaccatgttggccaggatggtctccatctcttgacttcgtgatccacccgcctcggcctcccaaagtgctgggattataggcgtgaggagtttacttttaaaaaatggagtgtgacacgaaatggtgaaatttggaagcaaccgttcagagtgaggcagataactttgaggttgatgagatatggaaaaatgaacaacctttattttgatactctggtaggattagaaagaactgaagaaaaataatacatattttaaagaagttcatatttataagagataactgctaaatattttactgatattagggaatgtattagttatgatgtgagaattccacaggaaacaaacatagatttagtaatgagaggaagagtaaatgtgttccggatagatcaacacagagcaaagttgagatgtgagtatgagagatgtatgaggtactgagatgttaaagaagaccaaaccaagaggttccaggcagagtaagaatggagatcctgaggttattcagataagcatacttggtattactacttcccactattaaatagttgaggtaagtgggttaataggactgttagtgccagcccctaggtggcataggagtaccttggaatagaaagggttgctgtagttaaagctttggttatatggtggctgaataattaattacatatttagcatatttctttttctttttcttttttttttttttttccaagacagagtctcactttgtcgcccaggctggagtgcagtggcacaatctcagctcactgcaacctctgcctcccaggttcaagcaattctcttgtctcagcctcccgagtagctggggttacaggcacttgtcaccatgcctggctaattttttgtatttttttagtagagacagggttttaccatgttggccaggctggtctcaaactcctgaacttaggtgatctgcccgcttcggcctcccaaagcactgggattagaggcgctagccactgtgcctggcctaccatactttcaaataaaggaaaaatattaaaagtgaaccattatatatttttggtgctgcttaaaaatttttgttgtctaacagtgtgttctgtgattagaccttaaaattcctgattgttcactgataacaggttactaaaaagttagtttcattctatgattggtttgatggtttgactctttccagggagcaatgattttgttgaacactctttgtcaggtagctgcaattgaaataaatgctttttaggcatgaaggtaatttgaaaaggcaaagacataatttgaatacacatgttagatgattaagcatgattttcattgatgcagttggtggtatgagcaggataaataaatagcagatataatattataaggccaagacttctatagggaggaggcagtctcctagaataagaaggtgaggaacaacttctgacagcatatgactttagcttgtcattgaaatatttgagaaatggatagaaagagtcccaaaaggcagacctttcataaaggacataatataaggaaagacattttaatatcagataaatatgtaatcacaaatcaagtgttcctttaaattgcaaaatcttcatcattcttttacttgtcattatattaaggactttaactttgaattactaaccctaactcatccaaatattcctatatacacaggtaaacttatttcattctatttcaatatgcctaaaagtaaatattcaaacaagtgagccaaaaaaagaacagaaaaaaaaaaagctttgataatgatagttgagcatttttcaatataggatattatgtggtatctggggaagaaaataaattgttgaagtttataacatgtattcttagctagtgggaaaaataaaatatattaatatgtaatttgcctctgtttctacaatatatttttgtgtcaaaaggttgctttttcaaattataattattgttttaccaatgtccaaaattgcccacagagtaagatacatttatttacaaagccaacttctacatgagaaattggtatttatttgagcaacccagtgcattaagtggaaaaagtgtgcttaaagctggagactgttatatgttatttaatggaacaaacacagagaagttattatcatagcaatttacttccttcagggcttagtaatttgaaagaagataaatgcatttagtagtagtgaaggggcttagagaataatgaaaaaagattattaaaaggtcaaagagcaacaatgttagaaacattataatgatgaagtaaatgaaagagtgaacaaacatacatatttattatataaaaataaaacttattttgaagaatgtcaaggtcataaattttataaggacagctttatttctcataaatggctgcagcctgcagggtggccattcagacaggctggaaagcacagccttggctggaagccagtaacagacactttgagggaggggcaaagagaatagtaatttatactgagcaagtttgccaaatatacttattcaataagctacaggaggaattgtgaatatttatgaaaagagatctctgcccatgtgcagttcagcttcatactccttcatggttcccatgtacaaaaaacggtggcattggcatgatctgtgggtagaggtgttggatgttttgatatcaaaaggtgaagcagaggacacaaaaacccttactgtgcattctctctagactggccagaaccactctgtggttggtagtctcttattagacaaaaatagaggggtgtcaggtggttgattgacgttagtggtagagtcttttgaaaggcctggtttttgtcaagcacatagggagaaaaacctactcatggttagcaagggaaggggtttaatgaagtatgactgacacccatcctattgtagccaagaattcagttttcagggttactctgggttcctctttgcaatgagataatctgttcagtcagttgggaggcttggaatttaatttttagtttacattctacggtcaaatatgtggacccttagattttcaaggtatgtcctcatttgaatgatgcacattaatagaactgtgggatatgatgaggtttctcttcaaataacccaatcaatcttttattctttaattcatagtccctcccaccgttttccctttttctcctttttttcctttttgcctttgttagatgcccaggcacgccacagtaccaggcattatcagtaccagctcacgttcctttccttatttagaaagaaaactaactttctagctcattacagacatcccttcccctttcctctctgctttcatttacgtgcccaacttatctaaaaaaaatcaaatgtttagccaaccagaattagtttagattgtatgacctgaccccagccaatggggaaagggtacaggggcaggacttgcatcaggaataaaggctctcgtgcccatttcttcaggtatgctgtcctggcaactggccaaggaggcacccctctgcgcagaagtaaaattgctttgctaagaatcctttgttcgagtgttcagtttccttaagattttgagcgttattcctaacagaaccatcaaaagtacgtgggaactgagggcattaatttgggaaaagaacgagaagatagggaggagaacagtcacaccataggaaaaaaaatatgatcctagggaagtgctgaacttgacatagtgatggtcatactgtttctggatcactatagattctccttgacctgaaaaagatctttttagaggctactttcttggtcccatgtttgatttgatatagtttcagctcaacgcatgctccaagaaagaagtcaaaagcaaatatttgagaaaaaatagctatttttaataaaatttgaagatagctataccaatatcaattgattgaataccaataacatagaataataactaacattgcagattaaagtcaaacctttatacccacaaagaggtgattcacagaatgcaagttaagtttcctcaataaaatttcaagcacattgtcataaactttaacaatacttgagataaagatggagttttaaagacagagaaagagagggaaaacatgaattatgtaagttttggaataaaattggcatcagacttctcaatagcagctgggaggcaatggagcaatggctactgccattatgaggagaaaatgtccaacctgagtttgataaacagttaaaatataacaccgttgtggaagagaagataaagacattttcaaatgtgatgtttaaaataattttctcccaatgcactcaaactgagaaaaatagaaaagggtgtgtttaaccaaaagaaggaccaaatttaaaaagaaaaaagaacaagatggaggacacagggtatctcacacaggaagggaatgacagaaaatcacaaaagtaaagaaaaatcccagggtggcagttatcaagaaagcagtgacttcttgagctgggaaatggagggaacaaaacagtgtatatgcatatgtctatagtagcacaactcacaaatgcaaagatttggaaccatcctaaatgcctatcaactaatgagtggataaagaacatgtggtagacatacaccatggaatactactcagccattaaaaggaatgaaatgtcttttgcaacaacttgaatggagctgggggccattattctaattgaagtaacacaggagtggaaaaccaaaacccataagttctcacttatacatggggactaagttatgagtacagaaaggcatgcagagtgatataatggactttcgagtctcagaatggggagggtgagagaggtactagtaataaaaaactacacggtgtgtacaaggtataccacttgggtgatgggtgcactgaaacctcagaattcaccattatgtaattcatctatgtaaccaaaaaccacttgtaccccaaaagctatggaaatttttttaaaggcagtatatatgaaagaattggctcctgaaaaactgtattgagatgcttgaggatacatggtaaaatatttatttacaaagataaaggcaatcaagtagatgaaaaacatgggtctactatcagtgctaggaagaaaagttgtacgaagaaataataaaatgacatggccagggcaatggccaaagtttcacacttacaaaaatgacaccttgtattggagaagcaaatctcatgatgtataaccacttcatccatctgtttagtttatctgtaataatttccataaatttgttctttgggagaagttcttccccgacttcaaagtgaaaagttaacgaatcccagaattgttcaggtcatggtaaaaataataataataataattcttataattccaaaatccttcctccaccttgattctcttgatttctgtgcaatctacttgtgggttttagatcattctagcaacttctgacacaccaacttttacatttttgcattaatttttgtcagctcactataacatttcatgttaatattatgctggtttcttaataagtatttccaacttaacatcgtgctacaaatataaatgcaggtttttaattaaacaacagtttttactgtgatatcactacattaaagagaccccttgccccacagttgccttcttttttatataaaaaaaatagatatctatgacatgactgctggttcttctattcttgctatcctctgttgcctatacctaccttcctttgacctggaaattgcctttctttccatacaacattatttctcctacatacaagtgtcccactcacacctcccaaatataaagacatgtggcaataccctccatcttaaaacaataaaaataaaagaaatttttcctcaaactacgttcttctccatcgactgtcttatttcttcttttcactgaaaacttcataaaaatcgatggtctccactcctctcattctatcctctcactattaacccactagagtaaagcctttatctccatcactcatgagaaattgtcttatcaatgcttcagatgtctttcacattgccaggttaaattctttgtatcttcgctgatctataagtaacttatgacatagtacatctctctcttcttgccttgatcctcccgatatcactgttactcagattttctactaatacaatggtcattctgttcactcttttgctggattattatcatctgtcataacacaattttttagaatgtctcagagattagctctgagcccttcctctctttatttcacttgttaggtggtgatatctaacagtacacacacacatgcatgcacacacacacacacacacaatctcttataacttccctcttctgaatattggacctaaaaaatccaactgcgtacttgaacgtctatgattatatgaaaattaacatgtctaaaataaaattacccttcccccagtagctcttcccatttatgtcaatttcagtatctgaagaacatttactctaagtattaaggggatctttttatgctctcttcttaagcattttccaaatatgacgtagtgaccccgtccttcactaatgccaccctgggtcaacctccgagcatctctcaactaaaaaaatttagtggcctcttaactggtctttctgccatcccctttaagacaaaatgaatagtaaatatattaaataagtacattacacacttggttacaacccaattgttgctacagaaaaagaaaaagaaaaaatgaataaagaaagtaaaaaggattgtgaatgccagattgtgtatgggcgtattttagtaaagtggcaatagaaagtggtcaagataggcattgacaagagaaagaagagtcttccaggcagtagctagtccaagcggaatagagtaaatgaggaggaaattactagaggagaatgtccaaggtaaaagaggactccattatttactgaattcacttgtgtgttaggctgttcttacattgctataaagaattacctgagactgggtaatttataaagaagagaggtttaattggcttatggttctgcaagttccacagagagcatggtgcttccatctgctcagcttctaggaagacttcaggaaacttacaatcatggcagaaagcaaaaaaaagagcaggtaggtcacatggagaaaacaggagcaagagaatgggggtgtaggtgctacacccttctaaaccaccagatttcattagaactcattcactatcacaaaaacagcacgaaagtgataatgctaaaccattcatgagaaatctgaccccataatccaaacacctcccaccaggccccactttcaacgttggggattataattacccctagtgacccactagcaaaatttttgctttctgttcctgtgacattacgtcctgctggcctagaggtcttagttccagagggaggaactctgccaccaggagacacaacaacaattccattaaactggaagttcagattaccacctggacactttggtctccttttacttttacgtcaacaggctaggaagggagtaaagtgttggctggggtaagtgacctggactgtcaagataaaatcaatctactactccacaatggaggtaaggaagagcatgcatggaataaaggagatccattagggcgtctcttaatattaccatgccctgtgattaaggtcaatgggaaactacaacagctcaatccagggaggactacaaatggcccagacccttcagaaatgaaggtttgtgtggctccaccgggaaaaaacccacgacctgccaaggtgcttgctgaagacaaaggaaatacagaatgagtagtagaagaaggtagtcacaaatatgagccatgaccatgtgaccagctgcagaaacaaggactgtaattgtcatgagtgtttcctccttttttgctgttaaaaacatgtttgtgcatgtatacacttgtactaagaaaatatctttattctatttcattttttaatcatgtgacataatatttattgacttcatatcggcatttaagtattcttaactttatgtaatagcatttgggttggggattgatgcatttccgattgtacaaaagatactcatattatgttaagtgtaattatgaccttattattgtctttatttggagattatgtataatctcaggagatgtatatgggttcaagttgaccatgggtggacttgtaatggttaatactgagtgtcaacttgattggattgaataatacaaagtattgatcctgggtgtgtttgtgaggttgttgtcaaaggagattaacatttgagtcagtgggctgggaaaggaagacccactcttaatctgggttggcatgatctaatcatctgtcagcacgacctgaatataaagcaggcagaaaaatgtgaaaaggctagactggcttagcctcccagcctacatctttctcccatgctggatgcttcctgccctcaaacatcaggctccatgtttttcagctttgggactcacagtggcttccttgctcctcagtttacagacagcctattgtgggaccttgtgattgtgtgagttaatactacttaataaactcccatatgtaggtgtgtgtatatgtcttattagttctatccctctagagaaccctgactgatacacctgctctaacaggctgttgaatgcccatggcttttccaggtgcagggcataagctgccagtggatatactattattgggtctacaaggtgatggcccacttctcacagctccattaggcagtgttccggtgaaggctctgtgtggggacttgaacccttcattttcccttgatactaccctagaagttatctgtgggggttctgtttctgaagtaggcttctgcctggacacccaggcttttcatacatccttggaaatctacgcagaaggtgccaagacttattcattcttacactctgtgcacttgcaggcttaacagtacatagaagacaccaaggcttatggcagtttgtactttcctgagcagcaacatgaagagtatgtgggaggttttgagccaaggctggagccggagttgcctagacgtggggaacagtatttcaagactacacagggcagcaaagccctgggcctggccatggaaaccattgtttcctactaggcctcaggacttgtcatggaaggggctgccatgaagtctctgaaatgctttccaagcatcctcctcattgtcttggctatcagcacttggctccctttttagtcatgcatacttctctagcaagtcgtttcttcacagcctgcctgaattcctctccccagaaaggtttttttcttcctctgccacatggccaggctgcaaattttgaaaacttttgttgtctgcttcccttttaaatataggttctaactttaagtcattcctttgttcctaaatctgagcataggttgttagaagctgccaggccacattttgaatgcttttctgcttagaaatttcctccaccaggtaccctaaatcatccccatgaagttcaaacttccaaagatcctcagggcatgaacagaatgcatccagggtttttactaaggtataacacacatgacttttgctccagctctcaataagttatttctatctgagacctcagcagcctggaattcggtctccgtatcactataagtattttgatcacaaccatttaaccagtctctaagacatttctaacttttcctcatcttcctgtcttcttcaaagctctccaaactctttcaaacatagctcattacccagttccaaagctgcttccacattttcagatatctttatagcaaaggctcgatcctcaataccaattttctttactagactgctcttgtatttctatgaagaaatatctgagagagggtaatttataaagaaaagaggtttaattggctcccagtactgcaggatttacagaaataatgatactggcatctgcctggcttcttgggaggtctcaggcaacttacaatcacggtagaaggtgaagagagagcaggcatgccacttggtgaaagcaggagcgtgagagagacagtgggtgcggtgcagggcagggctagggagaagtgccacaaacacttttaaatcagcagatctcatgataacccactcagtattttgagaatagcaccagggcggtggtgctaaaacattcatgagaaactcacccccatgatccaatcacttctaccaggccccacctccaacactgaggattataattcatcatgagaccttaggtggggacaaatatacaaattgtatcaatatgttatgccacaattatcatataattatttccatgatttatgccacattaagatatttgatttttactctgagtgaaatggggagaccttgaagaattatgagcatagactggcccattttaaatttagtttcaaatcagtcattctagatgatctgatgagaattgtctaacaacatgggaaagctaaataaagaaagacgacttgggagtgtgttcacagcagttcaagatgactagtaactcaaaaaaggtgccaactgaggaagtgaggaggggttagccattgggtacatgtcctgacatactggatactggacgtgagagaaatgataggtcaagttatgattccaaagatcttgctcagcaacttgaagagtaagctgctatccatggatagtggcaggctgcaggtgaagcaggtttatgaggggatatcagaattcaattttggttgtgtctgaaatgtctatctgacatctaaatttgagaagacagttggatatgtgagtttaagatttctgttacacattcaaattgaggaggcagttggacatgtggaaatcaagagagagttctgacttagagagattaattcagtagtcttcagcatatggcctgtattcaaaatcatgaggatggaatacattatcaagggaataagtattaattcaaaaggaaagagaaagtggaccaaataattgaagagtactgaaaaagaattgacaaaaataaatgggcaggacttggggaagtgacagagaaatcagcagtggaggctaagaagtgaccagtgatcttgggagaaaatcaagacattgtggtactctacaagcctagtggaaaaaaaaatagtaacaaagagaagagagcaacggaatgtgttacttaatcttaacatatcaggtaaaatatctactaaatgaatgtttcaaagataggttacaaacggaagaattggaaaccggatgcaaaaatagatcgatgtggtttaatctcacctcaaattgtaatccccatgtgtcaagggagggacttgtaatctccacatgtcaagggaaggagggggctgcatcatgtgggcggtttcccccacgcttttcttgtgatggtgagtgagttctcatgagatatgatggtttcataagtgtttgacagttcctttttcacatgctttctctcctgctgccttatgaagaaggtgcctgcttccttttctaccatgattgttaagtttcctgaggtctcccagccatgcagaactatcagtcaattaaaactctttccttgataaattatccagtcttggctatttcttttttctttctttctttttttctaagacagagtctctctttgcattccaggctggagtgcagtctgtctccctgtctcccgaaatcaagtgattctcctgcctcagcctcccaagtacctgggattacagttgtccactacctggcctggccaatttttgtatttttatagagacagagtttcaccattttggtcaggctggtcgcaaagtcctgaccttaagtgatccacccaccttggcctcccagagtgctggaattacagacttgagcctgtattgggcctcgggtatttcttaatagcagtgtgaaaatgtactaatacacagatattccaaagagttttactacaaagaaagcaaggactggggcagtagctagaagaagaaatagaatcagcagaagtgttattattgtagttggtattctattcatttttaaaattgaagaaataacagtttatttggatgtttataggaataattcaatagacagcaaaatttatgatgtatgacagaaaaagaagagttgccagggaagtgccctgagcaagtaagaagtaataagttagtacttaagtggaaggatgtactttgtgtaagagcaaggaaatgtcatctgctacagcaagtgggaaaaaagagtatgtgaaagacactgctgattaatttcaattttctagtaaagcaggaaacaagtaggaagcaaggtcatatggtatgactgttagaggaagggctgggagtcactgggaggataaatagtctgcctcttgcctggcagtaccgagagccctccaaagcccgaagtgatctggtccctaatatctctctaacattgtgctctatgacttgccttctcaatatgtaggcctggctgtcttggttccttagccatttctaggaaatgccaagcacactcctgccttaaaaaatgtcaaacttttgctccttctgcctagtatactttctcctgatctccacatagactcttcctcacttcataaagcctctgttcaaatgcaagtctttgcctaaacaaccaccttgttattctgtattctcttatcctactttatttttcttttagcacatatcaatacttgactcatttatttgattatttattgcctgccttttcccgatagaattgtatttccatgacactaatcttaggtcctagaaaatgactggtagatagtaggtggtcaataatgaactctgttgaatagatgaataaatgtatgaaacagtgaatgagtaaatggttactagggaaagagaacagagaaaagtggggtgtgtagcagagctaaatttctatatactgtaatggaaagtgcacaatcggtagtatctgagtcacttatttaagagacatggtctttaaacaattgaagttaaatcacagtaggaacagataaagtatcaaaaatatttgcctttggggaggtgttggcatgagaaagggcacatacttatctttggttatagccttttaacattgtttgattttttcaaactttgagttcataacattgataagcactaaaaacatattattgtaaaaggccactttgaatgcaatgatgcattttacagccatttctgccatctaaagttgtatgatctaagctttttgctgcccccacagaagcaaccatctgaacaaactgaagcttgaacgccccatagttcaacagaattaatggtagattcctttcaactttgctctctttttccatattacagtcaccttcactagcaggttgcaaatagtcatgcaataatgtctattttatttcatttcaaagagctctgtttaatgcatttgttgtacttttgaatatgactaaatcccaattcattcttccacaggcaggagatgtgaaggcagattgtctgaatatcaagatgctgtcctaaattatatgaggtatagatgcatagtggcatgcaaattattttacatctctgtactttagtttctttcttcattgttaaaatgagaatatctatactttaggcctctgtgggtgaaagaaattgaatatgtacaatatttacaatattacctggtacatagtacacagtaaatacgaaacacatcatagtaattattattattataaatactatttcaagctgtatccaaatggctagatgcgcttgcattctgctcttcagatatataatcagtaagacaatgatgaaagtggatgcaagaacaccatgtattcagcagacagattagagtttaatcaagagtgtttcttaagttcatcatataaaacaaaatgaaaatctgtggattctactgaaaatgaaaactgaatattaaaattatctctaaactgagtttaaaatgttaactttgaaaatagtgagctgaaaatgctaagaaatcatcattaaaaactaagggcttttttgtttcatttattcgaattctttctacctgcatttgtgagtgtgtgtatgtgtgtgcacgtgtgtgtatgtgtatgttgtgcatgtgtgtatatatgtgtgtgtatgtgcagttggagccaagacaggcagatgtatataagaattcctgcctttcaaattatctgaatatccatgctttttcagggactattaacatacatcagaaaataattcctctaaataaaatatccctagcataaatactcggccagcgcacagctgtataagggccctgacatatcagaggtggaggaagtctatagcatcttcagctctagccctatactctctattttatacagagaagcaagagatctggaaaaggggcagaacctactcagatcctgatctctagacccatggttcagaactattttaactgtgccatacagcttcaaataatccaaaacgaaaaatgtaacagacaagagagcaatgaaatgtgttacctgatcttaacatatcaggtaaaatatctactaaatggagtagcatgaagataggttacaaagagaggaatggaaacaggatgcaaaaatagattgaatggtttggctctgtgtccccacccaaatctcatctcaaattgtaatctccacgtgtcatttatccttatggttggttattgattgaactttatctctgtgatcttattatgaacgattttgctctctctggatggcagtagtcttaaatagacatatattttatgaaaaaaatgttattttttaacctactccttcataaagaagtggagaaaatgccactatttataggaagataaagtaagtggacattttatgaaggcatacgtttaaattagatgaacacataaatctgttgctgaaattacctgcaaatatacagaaaatactccagctcaagacaatacaacacaaatcaggtagaaaattacttgcctataaatcttaatctactgcaattttattttccctcatctatttgccatgtggcgctcctgaattttaggtgctaggtctattacttggaaataggcttgtcctaataaaactgacgtttctaaagggctgttttcatagaatcatgcccccatttctgagatccctaattcaacacctttgacagtctcaattctttgcagggtacaataccgggaacaaaggggaaaatacaaataaaagcgaagaagaaatgggagcagggataagctcttcaagttgttttagtcctcataattcaaaaagttataaagttctcttacaccgaaactaaatgtctcaattttaactctacttttggtcttctatcactgacaggcaaactcaggcagtcttttttttttttttttaagcaaagcaaattttattacacataaaattaatatatcaatatacaataagttacactgttttatcttactgtacattaattcaggaggcgatttttactttttctttaatcccacttcttaatcccagcaaaactttctcaggcagtcttttaaatgatttttggataagttctctctacctaaactttgattaatttttttaattcaaccccagattttatctccagtaattgattgattatatgttacacgcactcagttttcatggaagtagtgaaaatccaccggtgtttttaagttaaagttttcatgtaagagcataacatcgaataccaatgagcaatctgaaagcaggatgggatttcttattcaactcttatgaaattcacactagccaatgaattctgttccatttaatcacatcatttcaatatttcctgtggaaggcagcatttcagtcgagccaaatcgggagacttcatcttcatgaagtacttcatctttgaaagaggctgcttgtagtcatgatttttcaagccttttaggcatctttaagcagtatacttcaagattcccaggaacatgtgatattaaaataattttgtatattaacatttgaaaccagtcagaaaaaatagctttgctttttatttaattatagatgccacaagctaacatttgctttcattattataggagaaatatgaattgctatgtagaaaatgtcaatcgtgcaaaatatggtatatcaggctttataaataaatatttcataaactagtttatgtaatatcaggaatatttaaaaacaaggttttgtttcaaataaaattgcatgtcactgggttaagcacaagtagttttctttggtataagacttaactttctttaaaacacagaaatgctccctaagtattcactaagaaatacattatgtggtatagcccaaacttatttgactatgggacctatatttcttggagcatctttccagaagtgaattccaaggaaaaagattttaaagcatagtatgaataaaagcagtaatagcatacttcattaactttaatacttgtagatgttttatttcctgtctttccttctcaaataggagtacatcttttagaaaaaaatgggtaatttgaaatatgtctttgtacattatcacaaaacgtaatacctgaagatggcaattgttagtagtaaagcctttgttttttctgttttgttttttcagtttagcagtgatatactgaactgatagtaatgttcaactgcacactagtcatttgcttataaatccaagatagctctaaaatactcaccaaaatattttctgttaactgcttggtcaaaattttatccttgcaactaatttttctcccaccttcttatttgataaaaaaaattgcaatgtactagcaagattgggtcagttagaaaaattcaaatatctctgttacatggttaaattttttttaaagtcaggctacttaataattttcatctcataggtatttctttaccagcctgtcaatgtcataagaaaatagttattttcagacaatgaaagtgtaaagtgaggaattttcacaaaagtatttattaaaatgtgagaaagtattcgaagctgtgaataggatataccttcaggatgattatttttgcaggtcaaaataaaatggcagtggcggatttcttgaaaaagaaacaaatgctgatgagttgaggaagtgagaggacaaactaaaacctacaattttttttagaaatagctactttaaagttttaaacgactcacataaaatgaattctattaacccatttatatatgatataattttggagtgctttataagttctcactgattttaccgctgacactaagtagtaagcctttttgttgttgtagctccatcttagaatatctccatcccaagaatctttaaacaatttgaatttacaaaagaagtcaatttttgttgttgttgaggtgaaatcgtgtcatcaatatacataggtacctctttaatttttaggaatgttcatatatatgtaagacaacattatttcagttggcttaggaaaataattttttctggtgaatttatatttttgttattttgatcctaagtttaaaaatatattcagatgaccaacaaatacacccaaattgaagattttaaaaattgtttttcttgtttgtttatgtgctcattagtttatgttcttttagagggacagaaaaaaatgttgttcttaacactttcgagataattaaaggagacaaaaaatatgtggaatattcatttcagctatagaactaatactgttttggttttatatgagcactcactgagtcctgtcctccagaccttaaaaatacccttgtggtgtcaaacattatagaggttataaacagaagtattgattttttaaataatattaaatcattgaaaactgatgatagaaaaattggaagatttttgagattaaataaaccaggctgctaatatgtggacctgcttcaagcaagcttagtaattaatattgcatcctgttcaactttttcaagtttcagaatcagaggagaaccaaataattttcaaccgtttttattgttgccgttgttttgttttatttagttttgattttattggagtataaattgttaaccctacttagcagtcttcggactggctcaaatatttttctctcttctttggttgtatatgctcactctgcctcctttgtttatagttttcatataatagttacatgttcctctccccacttagggctaccagaaataatacaaatgaagagcctctcatctcttcaaaaataggagatacaaaatcccatcaagtttcatatctgtgtcttcatattaacctctttggtgggtatagaccatggtttgtttggcttgttatttacactaaattcaaatgtaaagcacaacctcattcaaaacagtaatgaaagatgaaatagatagtacataaatacctgactaataaatatcaataaatgaatgaatatatagatgaaagttgtagtaagaagcttcccagaatatctgatggactctaagcatcgtcttcccttctgcttcacttgctacaaatgatttgtgttccatcagggtacaatttcccagggagcttcttaaatatgcagactcaaggtcacactatttctcttctatcctaactccctgcctcctctgcccctgacacacacaaacaaagatttgagagggtctaggaattagaacttaatgcaggttgttcatgaattttataccaaacactctaatcactggagtcagaatagtcaagaaaaagatatatatttgaatgtggtttgccacttattttaaatcagtctcatgaatagaacaaaaaataaaataaaaaagtgtttccttttaaacacaagccatggttttgagttaaataaatctatttttctcccaagaacataaagaaccatcttgtctctattttgctaattgaaggccatggatttgaagtctcctaatcacttctcaactcttattttgcaaattgtgtttcctgaaaatagactggaattgcgtattcaaatgaatgtagtttcatggagtatgatcctgggattgattcctttggaatgaaaggaaaggaagcaggattgggaaagagaaaaggtgggctgtgaagaaaactcagcaaagtcttcagccagccccttgagtacagtgaagcttgcacattgtggccaaggggctgggccttcacactcccactatatccattcatcattaaatatgggctgccccaaaaaagggaatctggccttaggccaggcaacactttccagagctttctcacattggaggctgtcagctgctagcatccctaatagccaaaggcaagtctttcagtcctgaggcagacccaggcagtgcattatagaatcaaccatatcttacttgtttttaaattttatattttctttttttttctttttttttttttgagacggagtcttgctcttttgcccaggccggagtgcagtggcgctatctcggctcactgcaagctccgcctcctggtctcacgccattctcctgcctcagcctcccgagtagctgggactacaggtgcccaccaccacgcctggctaattttttgtatttttagtagagatggggtttcaccgggttagccaggatggtctcgatctcctgaccctgtgatccgcccacctcggcctcccaaagtgctgggattacaggcgtgagccaccgagcctggccaattttatattttctttaaatatgtccccctatatccctttcattctttttttaaaaattaatattatgtttttattatactttaagttctgggatacatgtgcagaaagtgcaggtttgttacataggtatgcatgtgccatggtggtttgccacacccatcaacccatcacctagcttttaagccccacatgcattaggtatttgtcctaatgctctccttccccttgttcctcacccctcaacagatcccggtgtgtgatgttcccctccctgtgtccatgtgttctcattgttcaactcccacttatgagagagaacatgtggtgtttggttttctgttcctgtgttagtttgctgagaatgatggtttgcagcttcatccatgtccctgtaaaggacataatctcatcctttttatggctgcatagtattccatggtatacatgtgccacattttctttatccagtttatcattgataagcatttgggttgattccaagtctttgctattgtgaatagtgcttcagtaaacatacatgtgcatgtgtctttatagtagaatgatttatattcctttgtgtctatacccagtaatgggattgctaggtcaaaaggtatttccggttctagatccttgaggaataaacttactgtcttccacaatggctgaactaatttacactcccaacagtgtaaaagcattcctatttctccacatcctctccaacatctgttgtttcctgactttttaatggttgccattctaactggcatgagatggtgtctcattgtggttttgatttgcatttctcaaatgaccagtgatgatgagctttttttttatatatgtttgttggctgcataaatgtcttcttttgagaaccatctgttcatattctttgcccactttttgttggggttgtttgttttttcttgtacatttgtttaaattccttgtagatttctggatattagcccttcatcagatggatagattgccaaaattttctcctattctgtaggttgcctgttcactctgatgatagtttcttttgctgtgcagatgctctttactttaattagatcccatttgtcaattttggcttttgttgcaattgcttttgccatttttcatcaggaagtctttgcccatggctatgtcctgaatggtattgcctaggttttcttctagggttttcatggtcttaggttttacatttaagtctttaatccatcttgagttaatttttgtataaggtgtaaggaaggggtccagtttcagttttctgcatatggctagccagatttcccagtaccatttattaaatagggaactctttccccattgtttatttttgtcaggtttgttgaaaatcagatgtttgtaaatgtgtggtgttatttctgaggcctctgttctgttccattggtgtatataactgttttggtaccaatgccatgctgtttcagttactgtagccttgtgttatagtctgaagttgggtagcatgatgtctccacctttttctttttgcttaggattgtcgtggctatacaggctcttttttggttccatatgaaatttaaagtagttttttctagttttgtgaagaaagtcattagtagcttgatgggagtagcactgaatctataaattactttgggcagtatggccattttcacaatattgatttttctatccatgagcatggaatgtttttccagttgtttgtgtcctctcttatttaccaattgctacaaagaaaataaaatacctagggatacaacttacaaaggatgtgaaggacctcttcagggaggagaactatatccccttcattgtttatgtgtattttctggtctatatatactcatttgaggccttctaatgactttctcatatagtgacttaaacatatatacagatagagaaatgtagaataacatgtacataaatatacatatatcagttctccacagagaaaccacttgcccttgagacaggaatagtaacaaatagttacttgaatatgcaaacagttaacactaaatttatgtttattagggattattgtatttatttttcatatacagggatcataaaaattgttactcaagtgcattttggtttatttcttaaacgttaaatatttcttaaatgtatgtgatgcaacaaaacattaagatattggtaattgtgattgctactcagccttttggctaatatcaagtgaagatattggtaatggttgaaacagagtgttgagtatgtgggatcactgtaatattttatatattttgcatatgtttgaagataatcttaataaaatgcttaaaatattttatctaaaagaaagtacatgtaaaatgacaccgctggcgatttttttactgtcatggtgtaacaaaaaagatgatggcagaagacaattcggttcacattaaaataaaatttttgcaacgtgtaagtgagaaaaaacctggtaaaattttgagagaaataagacactggagtatttatactgaagattgaatgaacaattaaaatattctaaagtagatttatgaagaaagttaaatatatagagaccatgaaaacattaaaagttaatgttacaaagcaacaagatactgtcaaattaaattataggaatcctttctaatccactaagagataaatatttgaaaatattcacatgtatctacagtcacataaccaaatttaaattagcttgcgtcttctactttctcattttggcccactggtccatggttattacacaccagcagcattaattttgcaggtaaaatctcttaaattttcttttcaactttactttccatttccaggcctgtacccacagagacacatgacacaacactcctagtgctataggaacaatgaatactaaatagctgctataaatacaggcatcataacatcaaatttagtgccacgtgatttcagttggttttcatattcttatgcaactcacctctctatatatggcttccagtttttaataaatccattactatattttatgtttgcaaagggttattacaggttacctaacacagtagactggactggaaggttaataacggatttgctttgcaaaatgtcacacaaattgatgcaatcagacaagacaggccatggtccaaaggtaattcatttataaaggtactaatactctaatcaattctaatccaaaaatatctgaaaatgacatttgtcctgtaatcttgtgaacattatgtagagtggaaaagccagcatggaatgaacagagaatttgtttagcaaacactgtaatcactggagtcggaatagtcaaagaaaaagatatatatttgagtgtggtttaccacttatttaaatcaatctcatgaatggaacaaaaaataacacattttatgatgaatttcttatcttaggtatagggttagctcttccaatagaggctgattatttgtgaaatgtttacatttcctagggagaagagatagattttccaataattttatgaactattctgagtagttgggtgaggaaaatccaccaacaatacatcttatagctcactgatattcaaaatttgttttcactgggtttctctgtctctgcaaggaattaagaaaacctgctgtaattgcgttagacataaagggcagatgtaattaggttcatggtaacttgcagatcaaaatgactccagtcattatggttcgcaaaccaatccctcttttttgttcactattttgttcactggatcaggaaaacacaggtgtcaatagtatccagaatgagatacataaaggtacaaaggttttgttcaccagatattcttacataggaatgaaaggaacacttcccaaggaaatgcatgtggcaagtcatctgaagtgcctgctctaaaactgttctagaacacctggggtaggtagcacatgctccacgaaaaggcaaccacctgactgagggagttgggaaatttctaatagtggctcaagtgtgaatctttggggagaataaataatgtctaggttatatttatgggaagaattgtttgtgacgtgcaaagtgaaattcctgatcatagattcttagggataacttaccatataaatcaacaccgctctatttatttgtgattccttgctgatgcaaaggctggtgactgctctacccagaatttaaaagattgtatttaaagacagaacttactctagtgggatattgttttttcctctaagcctgtagtgagacaaaaacattataaaacagttatctaaggaaaaaaggactttgtaacattgtttgtgcattatagacaaaagtcatcatatattcttgagtcttatttctaagaataactactgaagtatgtagtgtctggattcttagttagatgcaacaggaatcaattgtatgttattcaaaaaggaaaaagtgtgctgaaataacctgagtatgtcacctgtagctagatgagccagagagctggacatgaagaaaatccagtggagaattatgacaaaaagtttactacagaactggtagatacaggatagatctgctgctaacattgaatgttacaccctccagcttcctccccagtagaattggtcctagccactactcatcaggaaatacagtttgctatagtgaccgttgatgcgaatgagaaatctttattttccagtttctttaaatcactgagtactgttataaaatctatcaatacatccgatgaatgaagcctagcatctgtgcaggttccttagctataagaaagtctggaaagggaaacttctaatattttttatttctaaagtggcaaaattgcttacttcccactccccaagtctcagaagttggaaattacccaaataaaatataagatgtcagaagcttcagtgacaaatataataaatgtgctgaagtccatctgtttgactatccaatattacataaatacttctacatatacatatatggaactctcatttgaataacaagaaatgtttttaactcaaacatagaacaactaaaattctcatccatctgtttagggattatcccaggttgcagaataactgagtgacatcaattctcatttcaatattctctaaccaatgggttgtataaaaaaatgaatctctacaaagacagtgtctacctagatgaaacagtgaacaaaaaatatggcaaaagaggaaattgaattaaaaaatgtatgcacaataaagtagttcataaggcaatatacagaaatacatgaagaaggtaaagatatttgtctgcacctgactgaaaggcagactttagccaaagtttctatttctctgtttcactactaggatgactatacactctgcatagctcagaacaattatggtttacacctgtcatcctggtcgccttctgacacatttatttccaatttaaaaaatagtattgttattaaatgttatataacctgacaaaataactcgatagcaataagcttcaatgtgcttatttaatgaaacattcagaacattagtaggttattgaggttccattgtatccaacatgagttatggttttgaccagtgctgtgtggaacactttactaacaggatgataaatttgaattgtctccagtaataacttcccagatgcaaagtaactaacaccaacctttcaagaatagcatgaagggcataattgataaaataaattatgcttatagttaaaaacaaaaaacaaaaacaaaaacaaaacaaaacaaaaaacagaaaatgagacctttttggtacttgggtggtctgggaggtttatttgatattgctgcccctgtcagccacgtggtgctccagcctgctgtatcatggcttagttacaagccacaagtcttcccataagcaggatcagcaggacatatgggaaatctccaatgtatgtatcagcagagaagagtgtctgcgcagtgttgcagaacaacttacagaaagtaatgtgagtgatcttgctacaacggatttattatttattacagagtggaaatctgcaggtatttattttatcgttatagatacatttttattttgcaatgaaataacttgatagcaagatgcttaatgtcgtatttaagaaaacattaagtattgatttttctacttctcaggacaacaagaataaacataggccttgcatacaatattcaccagtaggctatagtcatgtcatttaagcaaatgacagtagggagacataaatctgcagaaaaagcatcagcatctacttgaaaatctgtagttaagcattaaaatctgtgacctccccagcatctaatatgctttttgtcatacagcacacgtgtgctaaaacttctaaaatataagaaatattcagtacaaaggagctagaaaataagtaaataaattctaaattaaaaaaaggaaccattctaataactgaatataaacatgtatgaattataaaatttaataataaatgttatccagactttttctgaatgagatgagaaatatagattatattttggaaaactttttaaagagagaaagagaaatagaaaaagagagagagagagaatgggaaaaagagagcaagaaaggaatggacagggaggaaggaaggaaaaataacaatggtacaatgacggtgtcattaatgagaaagaggaattacctacagattaggaaatttaaaaaattatatttcaacatatttgaagatacatagctgagaatacttacaagtctaggaagaatgaattatttttaagggaagacaattgatcaaatgcgaacttacatatttatatttgcttatatcttacacacttgataatctaacaaatttagttcaagattctattaaaatcctgaatagtccaagaaacaacaaaaaagaagaagaaaatagaaaagaaggaaaaagaaaggaaataaaatttatacccagaaagataatttgaaacaaatagttgctaaaaatgcttttacatattgtattagaagaataagttttacctagttttctaattttcaattatttttgatgcaaagttttttaaattatgttttatttatttagttttcaatttttattttattttatttatattttattttatttatattttgagagggagtctcactctatccccccggctagagtgcagtgctgtgatctcaactcactgcaacctctgcctcccgggttcaagcaattctcctgcctcaacctcacgagtagctaagattacaggcacgtgccaccatacccagctaattttttgtatttttagtagagacggggtttcacctttttggccaggctggtcttgaactcctgacctcaagtgatccacctgcctcggcctcccaaagagctgggattacaggcatgcgccaccgctcccagcctgcaaagtttttcttaagcatatataaacattaataaatattggttaatgtgttggcttcattacgttcaaaagaagcatttacaaatagttaaatgatattatgttttaagcagtgtcatcagatgcttaaaataggaaatcagttttgttagttaaaataaaacagccaattcatggaatcacagtaaatttagaaagttcataaagtcaacagtacaacctttaatatttcgtaaatgatactgtaagtctaatacaatactaaaaattgaattgaattgttcctggatttatagtacaaaaacaaaatttagtgtttgtaaagatgagatcatctatactggattaagaatcaaataattcaaataatacacttaattatttgaaactgattttctacaaaaatcactcattcatgggtatgtatacacatgcttacatacatgatgaaactaaacaaattacagtatttttgtgatgaagttgataatttattaaaaaaagcctttagcatcgcaatatagactcttagattatgtttgagaatgtgaaggatactctacatataataataataaaaatatattatattattgaacatacttctagataaattcattcttatttatcattatttttaaacattacttggaaatctgtaaatgaattagaaaattcaatagaatacctcaaacattgagcttttgaaacttataggaaataaataccaattattgaaaacaaagattgcaaacaaggagacactgaaaaatttccccttataaaagcatgagagaatttggataatttatacaaagggagctcaaactgtgtaaaagatttattctgaagtcctataattggctttgtaatatattgtcttgtgagagggtttttgttttgaaagagccctcatttttaataggacaaatttatattctgtaacagactgaaatgaaattgtgaaagccctatgagtttgcagcatctaaattaggcattacgttcatatttgctgaagaaagtttatctgaagaaaggcaaaaaatagcaactatgaaaaatatttaggttgatatatccatccatttcgatgcaaaaagaaagaaagaattgaaaatatcttccatttaataaactttgccctgcattcaccacatctcagcgcctgaagagtgaatatttcttggttgaaaataataagatgtggaaataatttgtcaaccatatactgcaactttccagaatatgccattggttattctataaaaacattaaagtaaaaacattgaaaaaacttctagaaataaaaccagtagcatattatgaaaaaaaaaaatatatatatatatatataaattaaagcacacaatagaaaccatgaggccggccgtggtggctcatgcctgtaatcccagcactttgggaggcccaggcgggcggatcacgaggtctgacaccgagaccatcctggctaacatggtgaaaacccgtctgtactaaaaataaaaaaattagccaggcgtggtggcgggcgcttgtaatcccagatactcgggaggctgaggcaggagaatggcgtgaaaccaggaggcggagcttgcagtgagccgagatcgcggcactacactccagcctgggtgacagagcaagactcggtctcaaaaaaaaaaaaaaaaagaaagaaaaaaagaaatcataagcaggtaccaacacagccatttttaatgtttacatactagatagaaataagcagctaatgttattttactgagggtgcttatgtgtggatatgcatgcatgtattgtttatagatagaattttatacctaagataattttgaacattgttctataggtccactatagaagtaaaatttgaactaacaaataggtatttagaaatgaaatcatttgaagtacctggggtgtcttcgatactcttggaagtgttttagtttgaaggataaattgtctcatttccctttccatgactcagttcatgtttccatcacctgcaccgagctcctcatttggagggtggttttattccagtggtggagcaaacaacaatccaatgggagctgcgagaagatttggaagagaattgacgtgggtcacacaaattcttacattctggctgctctttgaaaaacaaaaaacaaaagacctcaatctgtacttgtgaaattactaaggattgttaaagaaaacgagggacagccttcttagactaagagaatagactacttcatctggcaagatatgctcactgcaggtggtgggttccatgatcggtgcatctttttgttatttttagacacacatattccattattctctgtttcctgaatcaatagccttgatttacaagagatttgaggaagctgtgaattcagctgatgctaaaacctgacattctaaaagctggtttggttttcagctcgtctaagcctaagtagaatgaaaactatgagcacatttatggactgcccctgttttcaccttggagcacagctccgaggtacttgtcatattaggagcaaatatctcacaccagggaacttgaatttcttaacctctttgtctttctcaagattccctaaaaaacagatcctgaagcaaagcttatgtgttaaaactttattagggagcataatcctaggaagaaagcaatgtaagaaagtaaggagggaaaatatggctgggagtgttactgtgcccactgaagattgacagcaagcataactgcttgctctgagtgggatgagtcttaataggggcatccgaatgactgtatttcagaacaatcaatctgaagggaataaagaagaagaattcatccttgggttccctccagccccacatggagtgatcttgcctccccacaagtccagatcacctcatttagcctctccagagtaaatgcaatccagaagagctgggccagaggcatgcaggctcgtcaccagtcagtgccatctgcagggatctgtgatatgtggctgtagtgatagtagaaattaataacctgtttctattgtctcaggtacgaggcaacctttgctatgattactctgtcgagaaagcaaagcaagggaacagatgcgtagtgcaaaagctgaggttgatatacttttcataggttttcatggtagtagccacttagtctctcaaagtattgtcctccttgaccattgcattttatgtggccacaggtgatactttcataaatggtactatcaccaattattgaaattagtgattttttttttaacccaagcaagtcagataaccaatccaaacttcctcccagttccccaagtcattgttgctcacaatcactctggtaaagaaataaagtttcctaaattttcaaaaattgaattctgaagaattacataatcttggtgtaatatcgtcttacacttcactagtagatattgttaaaataatttcaggtgacttacaaaatttaaatttcagaatgagttcattgaaaatgcttactgtggattttatttatttatttatttatttgtgttaaatatacacattggaataagaagaaagacccaaacagaaaagggtttttgaaaaaggtagcattacagatatgtattttattgcctaattcaaatactttctagctccatttaaaataaaccatgtggatttgaaagtaaatgacaattcttccttattagtcttctctttcatggcagtttttgtgctttgaatttactgcctattcatattctttgatgagaaatgcagactccagcaatgtgtctaatgtgttgactaaaaataaccctcaactatattctagacagctttaaaggctagactgtattatcttttgaaagatcagaacaaagaccctttcagttcatgaagaatggatgaaaaattgctctaattagtttattttaatctctagagaggaatataagttgtctacacattataaatggctaatttttagtgattagtttttatttctaggcattataaccaaccacctggcttgccctggtcaaatttactcttttcatctttctcttgaattagatcatacaaaaaatgaattactgtgatttaaatataaatgacactgagctcataatgtgtcataaaacctttttctcttagttatttttatgagaacaactttctcttcagttactcaatacagagtaacaaattcttcactatttctcacctcccttatataaatattcaccacgtttttctattcagtctagtaaatatctctctcctttgctcctccatcaaccctaattcagtttcttgttgctttttcctcgaactaaagcaatgcttttaactgtcatccaacttccttctggcctctggccttcattgttactaccaataagacttttctaaaatgcaaatcttaacacctgcttgtttgcaaaaaccaaccaattactctcaaaataaagtacaaataattatattaacatactttatcagtgggatggttaatttgatgtatcaacttgtccaggccatggctcccagatttgtaaacaaatatttgtcttggtgtttctatgaaggttttcagatgtgataaacatttaaacttgtgggctttgagtaaagcagattgtccttcatgatgtggtaaggactcatccaatgagctaaagacctgtaataaatagaacataagactgacttctcccaaataggagggaattctgcagcagactgccttttgacttgaactgcagcactggctcttctctggttctctagcctgctgacacaccctgcatattttggattttccagtcttcataatcacatgagtcatttccttaaaataactctcttatctatatatacattttctactggtactgctgctctggacaatcctaagtaatacaaatgggcacttgtatccttccctacctccagccttgactccacgtacaacattctttgcaaccacatgacattgaagttctgtatataaaaaccagcatcttcttgaagacacagtctcttaaaatgttagctgctcggatgtctttcagttattatttggtccagtaattaaacatcaaaaaatgttcctttcaaaagctttttagttgttactcttaagttattgagatttctgttggtttttcttttgaaaccaatagaagttagaatataatacattaagaaaaaaaagcaagaggaaataaaagttgagttgaaatactcttcaggggaaaaaaaaacaaacttatgcaagttaattaggttcaatggtgatttctaattcctaattgtcaacaacttccctcacttagcaggagttccatttatacaccaactgtttatggagcatttactatatttggataatatgtctgcactgaaaatctttttttttaaatttcaacttttatttcagatacaggtggcacatgtgcttgtttcttttttattatttatttattttttatttattttattttttattttacaggatacatatgcagaacgtgcaggtttgttacataggtatacatgtgccatggtggtttgctgcacctattgacccatcctctaagttccctctgttcaccccccaaccccaaacaggccctgttgtgtgttgtttccccccatgtgtccatgtattctcaactcccacttatgagtgagaacatgcagtgtttggttttctgcttcttgttagtttgctgaggataatggcttccagcttcatctatgtccttgcaaaggacatgatctcattcctttttatggctgcatagtattatggtatatatgtatcacattttccttatctagtctatcgttgatgggcatttgggttggttccatatctttgctattgtaaatagtgctgcagtaaacatgcatgtgcatgtgtctttatagcagaatgatttatattcctttgagtatatactctgtaatggaattgatgggtcaaatggtattgctggttctaatccttggggaattgccacaccgtcttccacatgggtgaaataatttacattcccatcaactgtgtaaaagcattcctatttctccacagcctcaccagcatctactatttcttgcctttttaataatcaccattctgactggcatgagatggtatctcattgtggttttgatttggatttctttaatgattagtgatgttgagctttttttcatatttctgttggtgatgtaaatgtcttattttgagaagtgtctgttcatatgatttgcccactttttgatggagttgtttggttttttttcttgtaaatttgttagtttcttgtagattccggatattagagcaaagctggaggcatcatgctacctgacttcaaagtatactacaaggcaacagtaaccaaaacagcatggtactggtaccaaaacagatgtatagaccaatggaacagaagagagacctcagaaataacaccagacatctacaaccatctgatcttcaacaaacctgacagaaataagcaatgggaaaaggatttcctgttcaataaatggtgttgggaaaactggctagccatatgaagaaaactgaaactggaccctttccttacaccttatacaaaaattaactcaagatggattaaagacttaaatgtaaaacccaaaaccataaaaaccctagaagaaaacctaggcaataccactcaggacataggcatgggtaaagacttcctgatgaaaatgccaaaagcaatcgcaacaaaagtcaaaattgacaaatgggatctaattaaagagtttctgcatagcaaaagaaactaaaatcagagtgaacaggcaacctacagaatgagggaaaatttttgcagtctacctatctgacagttttcttataagagcacattatgtgatattgaggtttaaggtaaaaatcccatcactcagctagtgagcacagtacccaatagtaattttcaacccatgtcgctctcccttcactctctagtagtctttagtgtctattgtcccaatgtttatgtccatatgtgctcaaagtttagctccctcttgtaagtgagaacataaagtattttgtttcctgtttctgtgttaattcacttaggattatggcctctagctccatccatgtttctaaaaaagacatgatttcattcttttttatggctacatattatagtattctatggtgaatatgtaccacatttttcttcatccaatacatcattgatgggcacctaagttgattccatgtctttactattgtgaacagcacgatgatgaacatgtgagtacatgtgtctttttggtataatgattagttttcctttgggttgaatcctgggttaaacagtagctgtgttttaagttctctgagaaatctccaaatggctttcctgtgtgaactaatttacatttccaccaacagcatataagcattccctttgctctgcagccttgcttgcatcagaattttttttgagtttttaataataaccattctgactgctgctaaatggtatcttactgttgtttcggtttgcatttctctgatgattagtgagcatgaccactttttcacatgttcattggcaatctgtatgtcttatgtggagaaatttctgctcaaaagtcctttgcccattttttaaaagggttattttttgcttgttgctttttaaagtttgtatagattttgggtattagacttttgttgaatgtacagttggcaaatatgttcttccattctgtaggttgtctgttctgtttatagtttcttttggtgtgaagaagttctttagtttaataggccccacttgtcaacttttgtttttgttgcaattgcttctggggactttgccaaaaattattagccaaggttgatgttgcgaaggatatttactaagatttcttctaggatttttatagcttgcggtcttacatttaaatctttaactcatctttagttaatttttgtgtatggtgaagggtagaggtccagtttcattcttctgaatatggctagccagttattccagcaccatttattaaatacagactccattccccattgcttttatttgtcatccattttgaggattatgtggctgtgggtatgtagctttatagctgagttttctgttttgttctactggcttatttgtttatttttgtaccagtaccatgctgttttggttacagtagcataataacgtagtttgaattcaggtaatgtgatgcctctggctttgtttttaaagatttctttggctatttgggttcctttttggttctatatggattttggtagttttgtctaattctgtgaaaaaggattgaggtagtttgataggaatagcattgaatctgtacattgttttgagcaggatggctatttttacaatattgatgttttcaatccatgagcatggaatgttttggcatttatttgcattgtctctgatttctttcagcagtgttttgtatagtcctcctggtagagatctttcacctccttggttagctgtattcctaggtatttcattttctttgtggctagtgtaaatgggttcatactgttgatttgactttcagcctggacattattggtggatagaaatgctactcagttttgtacattgattttgtattctgaaactttgctaaaggtgtttgtcagttctaggagccttttggtggactcttcagtgtttgagatacagagtcatctcatcagcaaagaaaatttgatttcttcttttcatatttagatgccttttattttttctcttgcttgatttctctgactaggacatttagtactatgttaaatagttgtgagaatggtcatccttgtcttgttccagttcttaggggtaatgattccagcctttgcttgttcagtgtaatgttggctatggatttgttataaatggctcttattattttgagatatgttcctttgatatttaatgtgttgagagtttttattataaaggggtgttggattttatcaaaagctttttctgtgtctactgagacaattctatgttttttgcttttaatcctgtttatgaggttaattacatgtattgatttatgtgtgttgagccaaccttgaatttcaggaataacacctacttgatcatggtgagttaacttttcgatgtgcttctggctatagtttgctagtattttgtgaaggattttcatatctatgttcatcatggatattgccctgaaggtttcttttttcattgcagtgctgcagattttgttgtcaggctaacactggcttcacaaaatgcattaaggaggagcctgtccttgattttttgggatagtttcagtaggattagtaccggttctttttcatacatctggtagaatttggctgtgaatccgtttcatccaggctttcttttggttggcaggtattatgttacttattcaatttcagaacttgatattggtctatttagggtttcaatcactttctgatacaatcacgagagaccgtgtgtttcctggaatttgtccattttttctagattttctaattcatgtgcatagtggtctctgaggaccttttgcatttctgttgaatcagttataatgttatctttgtcatttctgattgtacttatttggatcttctttttttgttaatctagctagtagtccatcaatcttatttgttcttttgaaaaaacatttcgattttattggttctttatatggatttttgcacctgaatttcatttagttcttctcccatttaagttattccttttcttttgcttgctttggggttggtctgttcttttttttttctctctagtttcttgagatgcaagttagattgttactttgagatctttctaacttcttgatgatggcatttagtcttttaaactttcctcctcacatcactttagctgtatcccagcgattttggtaagctgtcttgcgtttgttagtattttcactaatttcacaaagtttttttaaaatttctgctttaatttttatgtacacccagaagttattcagtagcaagttgtttaatttccatatgtagttttgaaagatcttcttgatattgatttctgtttttattgcactgtggtccaagagtttgattggtacaattacaaaatttgaatttattgacacttgctttatgattgggcatgtggtcagtctcagaatttgttccatatgcaaacaaaaataattcaaactctatagttgttgggtggaatgttctgtagatgtgtattagaaagtgccaagtttaagtccagagcttctttgttacttttctgcctcaatgatatgtctaatgctgtaagtggagtgttgaagtttcccactattgttgttggctgtctaagccttttcatacatcaaaaaaattgctttatgtatctgagtgctccaatattcggtgtgtatagatttaggatagttaagtattcttgttaattgtacactttatcattttgtaatatccttccttttccttctaaagtgttattcatttttagtctgtttatcttatataaaaatagcaattcctgcttttttctgtttttcatttgcataatagatcttttttcatccctttattttgagcctgcgggtatcaatacatgtgaaatatgtctcttgaagacggcagatggtgaggtcttgtcttttgattcagcttgctattttgtctttgaaggggggcatttagcccatttgcattcagcgttagtattgatatgtgagattttgattctgtcatgttgttagctggttgttatgtaggcttgatcatgtagttgctttgtttgtgtgctatgtgcttaagtatgattttgtggtagcaggtatccttctatcaattccatatttaagacttctttaaaaacttctggtaaggatggtctagttgaagtaaattccctcagaatttgtttgtcttaaaacaattttatttatctttcacttccaaagcttagcttggcaggatatgacattcttgactgaatttcttttcttcaaggacaactgaaaataggcccccaatctcttctggcttataaggtttctgctgagaggtcttctactagcctgatggagttccctctgtaagtaacctgctccttccttctagctgcctttaatttttttttccactgaccttagtgaatctgatgactatgtgcctttgttatagtaatcttgtataacatctagttgtggttttctgtatttcctgaattttcatgtcattctctctagagagattagaaaagttttatggactatctcctcaaatatattttccaaattgcttattctctttccttctctgtcaataatgtcaatgagtcatagattattctctttacaaaatttcgtattttcagaggttttattcatttttttaaattcttttttctttattttgtcagaatgagttgattccaggaactagtcttcaagctcctgagattcttttctcagattgtctcttctgccattaatacttctgattgaattataaaatgattgtattgaatttttcagctgtataagttcagtttgcttctttcttgaaatggctatttcagctcttggatcattttactgaatttcttgatttctttggattgggtttcaactttctcctgaatctccattaaattttttgccctccagattctgtattctgtctgccattttagactacttacagaccattgatgatgttctggtaaacttggattaagggaacactctggccttttgaaccgcctaagttcttgtgctaattctttctcatcttggagggttgttgttcctttaattgtggtgtaatttaattacagtcagttggctttgtttatggatgtttctagagggctaaagctctgtatgtggtctttatttatggctgaattcttacccttggtttcatgggtcagtatattagcaaaatatttttggtgttgtagtttgggcaactatccagcagatggctatctagggtaactgccaatagttaagttcttactcaaccatgtggctcctttgtaattcctgggtttgcagctgttctctgcagtgaggtgggggagagaggttacactctcaccaggtatgctcctgggcattggggaagtaccctcggatcactggcactgtgcttgggaatttattttgctccaaaagtggatattctggggtgtatttccttgagcagaggctggggcaggaagataggccacaccatttctggacaggctctcctccccaggaaccattcagggctgggaactagcattagcatttgggtatgttgcacagtgttcccagcttcctccttcttcagactcagtgtctgtgtcatggttccatatattcttggtgttttctctctgaagatccatccaaattatgttggtttaccttttgatctctcttgatgggagcagcattttctggctgcatctagttgttggccatcttgtccctctagcactgggaatttgattgtgagctagatttagtccctcacaacaagctgcatggagtctagaggggaaaataaactggaatgccaagagttatgataaagcatgagttcaagaaaaggtgtttcattattttgtctaaggcaggattcctaattatttttgcatggggtttggataagaatctgtcaaggaaacaactccaagctgtgatgaagtcagggtcagtcagcctttttattataagtgatcagaaatatcaagatgaggatacgaagcagagcatggagtactgaaatacttgttttctagaaacttaagggactcttcaaatcatacatcatatttatgtatcatttttaaagggatattttattgctatttgaaggaataatattttcacatatattaagtcagtatgccttgaatgagcttattgaatgtactttattcttccccactactttccctcaaactggaggagacagcgaaggatggaatcatgaataagaagtggttggaaaaacataatcccactttttattcctggatactgcacagtcttttgttattaagtttagcaaaaagttctgaaacacagttctagatttctctcattgaacaatagacttaattatcttaattttatttatccaaagtttgagagttaatttagaaacacgatgaattattaataagtttgtatcaaaaagcactcaaatacataaacttgagtttcttagtataatacttatcttttaatgtctatgcattaatatctattaatgcatgataataatataataacaaccacaagacaagacaaatttactgcctataaaaagttcattgcttaataaaatgtcattttgtattactcattcttatttaaatcttggtctagacaattaaatatcaaaccctacaaatttattgagaatactgactaattaacgaccaacacaaaaccttcagtataaatagtacttgtctttcatctcctcacctagatgattagttattgttaactggtgaaaaaatcaggagcacatacattagtatgcatggtgtcataagcgaatacaacatatacattctgtttcctctctttccactcctggtatttccttatatggactgcctcatatccaacctagaagacatgagacaaaaaaaccaacctcaattgatcagaaaaatttcaaataggatcattatttatcttatagagaaagatctaaaatgaatatggagaagaatatttgatttgattagaacattacattttgtcattatttgtgctaatttcaatatggtaaaatgaagcccctggattctcagtctgaagtaaactggagaccactatttcagtaccattttagcacaaatatttcacttttcccttgatattaaaaaatagcagaaatgtattttcttgcaattgttttcttaagagtgtttcatgggtagctcattttccaaagaaatataaagtctagtatgatcatcacattccaatatttttcaggcaattttttggcatgcttatttatcttattatattattatatataactggataacaatatgataattaagcattttttcagatatatcaaggagaaattaaatgatgaaagagatttgatacagctatagattaatattttgaggtctagatttcaaaacttctgattttaaaatttagactttgtatagcattttgatagtattgttggcttgatatcaaatgtttagagcttgtggattattcttttaatttcaatatgaagaatattcaatcattattcttacaatatattgattcaaattttcaatttttaaaataaagttacattgggtaaattcaagtgtcattgaagtaaattacactacagtgaagagtagaagggaacagaaaaaatatgtgttctcatagtgtagaacatttatcataagaagtaaatattttatgggtgagaaaccagcacttctacttttatttaaaatcactgtatctagcaaatatgcctttgttatttgattttatttaaaacagagtgacatctaggtgaccatcaatagtacttgagtcaaaatttaaaaattgacatgaaattaatcataatacaaaaggttgctattataaattatagtgaaactaaaataagaataaatttttgaaatgtgctagtagagatatacaaaatgaaagttgctctaaaacatgatgtccctctttgagttagctgttgtcacaaaaatgctgcatgataataatataataacaaccataataacaactacaagatctcagtggaatgtactaacaagcatttatttagctcataattctacagaatggctggcagggagactaacctagacagagttctcttgagtatggttctgttccacttgtctttcatctatttcttcggacagcaggctagcccaggtgtattctcattgtgttggcaaagacaaaaaaaagttcaggtgtaaaactcacaacatatttcaagaatatattatataatatctgctaaaatactattggttgaaataaattatatggctgagcccagctttaaagggtagaaagaatgtacctcccaatctgatcttaaagcaagttcgtgatcaagctcaactacaaagaagtcaaaatctatattccttcacttgaaagtggaggagagtggtgaatatttctgacaaaataatttacccaataactatattagtaagactatgtgttataatctataattggctatagtataatgaaagtaatcttacaatttacacaagtggctactaaaatggttcacttaaaaatacttttggtaagcccatttaaaaggtatcatttaagtaaagaagataataaaattaatctcaaaatgtatcttcagcgggacttgagtaggaagtctttaactcttttttgttttttggtagaagaattgctactgaaaacatgccagttttgtaacaacttctatgtatcaaagtggatatattgagtaaaaaaggaaccagtctttgcctggcaggacatcatttgacgttagaaatggatatgtttctttttttttaccctggggtagaaaagaatactgggtgattcttaatcttgaaagagagggggctttccttggctagttgtaatgcagtattactttttaaaatctatgacaaatagactttagaaagtttcagtgggaaagcttaaatgtttcttttcataaatgatcatttatgtatgttatgaaaataaaggaaagaaacacacgatttttctttaatcctttacatctcacactgttatgagaatatgtgcatgtttcataatatttctgacaaagatgaattttcacccttaattcctctcaattataaagtaaaatgtttaatgaacatattttttgaagatatcttgtgtgtaaacaacacatgtaggactcccaaaatgagaaccacattatgcactaggaacttgcccacagatgaatatcttcttgtttgtctttaaaagtgaggtggaaggagataacaggaaaaatgtcctctcttttgtcagacaccaggaagagctctttatctagaaggtatttatctttgcatcagaggacaaaaaacataacatttcatgtgaagaaccaatgaccacaatatttagggataacaacagaagtcatttcctgcatccttcaattcattgacatgataatataaattctcattctcctcctcttagttggcatgagaaaccaaagcttttttcagcttcagagtaagttcagctgaggcctcctttgtgactgtgtcacggctcaatttctttctgctcaatttctgtcccttccctcactggtgttgatcccaagagcaattcctaatgaacccattacacactaatcttcacctcagagttagtttcccagaatatccaaggactaacgggagtcttctaataaacattcatgggctagctcatccacgagattgtaggcttctcaagcaaatttaacttagatgaatgttatagaagtactttaaatagaaaagtgaagtgatcatctgataaaaattgatttgaaatggcagagtattaacaggtaagaatatgaggctattttactcatcagagcaagaaagaacagggctaatagctgatagctaacgtacatatgacactgttctaaataaattcatataatatgttattaatattcataaaaatgctatgatgtaggtaatacatttatttatctctattaccccatattatatgataaaaatggaccacagaaaggtttagtacattgtctaaagtcatgcgactggtaagtggtgaagccaggacttgagccagtagtgtggcttcggagttctttctctttctctctatagccatgatgtacagttgacccttgaacaatttgggggtcaggggcattgatgctctgccagtcaatatccacgtatcatttttgactcagccaaatttaactactaatagcttactgctgatcagaagatttactgataatataaacagtcatgtaatgcatagtttgtatgttgtatgtgctatatactgtatttttataataaagcaagctagagaaaaaagttattaagacaatcacacagaagagaaaatttatttactcttcattaagtaaaagtggatcatcataaaggtcttcatctttgtcatcttcacagtatgtaggctgatgaggaggaggaaaaggagggataggtcttgctgtctcagggtggcagaggcagaagaaaatccatacatatgtagacccacacagttcaaacctgtgttgttcaagagtctactgtgtatctggtgattgctaagacagtaggaacagcaagacagttatgtgagcagaataatattatattaatgaggggaagtgaataggcattttaaatgtgattattgtatttggacaaaagtttgatgtacctatggaatccaagaggaagtctcttgtagctagctgaaagtgcagctctgagcctatgagaaatctatgaaggcgctaaagagctggaagccagaggacattaatgatagctggagccatggctagtgatatgacgattcatggagactgggtggaaggaaagagaaatgataaggtcaagaatagaatctgggttgtcatgatggtattatgtgcctgtagtgacagctactagggaggctgaggaagaaggatcacttgagcccagatgttcaggaccaacctgggcaacatagcaagaccccatctctaaaaaattaattaattaattaattttattaaaggtaaaataaaaagaatagaaactgggtagggtgcctgcacttaaacattctctatgccgaaaataatgacacagaaacaaatgaaaatatccacaggttttagtaataatagaaatagctaagattcatatgcttattttatatatacataagattataagatgtaagttactcaaaatctatgccttgtatcttgaagcatcaaattatttttttcaattaatagaaataaacctataaatactcatgcttatttcaatcagtgactcctataacccatatttcagaagaattttctgaagtgttagtaaccttctaaatgtcttcaatttcatggtttgttaacttttagagacatcaatatttttgaataagtaaaagcattagaatgattaattacatggtttagctaaaattcaaatgaaatatgtaccttttctctcactaactcaaatttgtttcaaaagaattgtgagttttgaaggaaaaacaccgaagagtcagagttttatgataatgaacaaaaactaagattaaaacatatataacaaataattttattaaaaattttccttgtttgtattaattataacataaaattatataaagtaaaatgtttttccataaatagtgtctgaaaaaatgtcttttattatgccattttttcacaaatatttacatcttgtaataaactttgtagttaggtgcttcaaagaaaaagtatttctaatttcttttgtccatactactcctaaaaagaaatcagtactgcatcagtattcagaaaccaaaattcaaactttctgtaagttctgtctcccttcaatggactgttaaaataatgatgacttttttcctccttgctatttcagttttcattattgttaatataaatgatgaatgtggcacaaccataattgaattatcccagtttatcacccctatttgtcttaaaaactattttccttatatgtttcagtttacaagatgtttggtcatttatttaaaaaactctctagcatttatctgaggaaaaaaaaacactcaatggcctaagttgatataaaattaatttataactgtgctctgatttattggttattagttttatttctgtgaagaaataagtttaaaagtacatcagatatatgtacatcagatacaaagaaagaaagcttttactttaattctatatcctgagggacttgaaatgcctaaatgactaagaatatgattgataatccaaatgtttctttttattaaaaaaaagataaatattttcacatactgcttatggacttgaaaggttaaaaatgttccaagtttgtttccccttaagatatatggatgtaactacttctttctagctgtccaaaatcattgatatctgggttatgaacctagaatgtctacatatagattatcattttaaactactctttctttttcttttagaggttttaattcaatccagaaatggaatttatctcaggcccctttccatttgtttcacaatattatctgaatgacaattattttatatcattatgtcataccttataattcattttggccgggtgcggtggctaacgccggtaatcccaccactttgggaggccaaagcaggtggatcacgaggttaggatattgagaccatcctggccaacatggggaaaccccgtctctactaaaagacaaaaaaattagccgggcgtggtggcgcgtgcctgtagtcccagttactcaggaggctgagacagggggatcgcttgaacccaggcagctaaggttggagagctgagatcgcgccactgcactccagactggtgacagagcaagactccgtctcaaaaaaaaaaaaaatcatttcacatgacattaatgcatacattgcatttgataactaattgaaggcagtgccattttaatagtatgctatataaaactattcatactctccaggagatatttttgatatgatatcatgaaagagaaatctgcttcattgtctttcttacaattgtcatcaatcgtaaggtttgttgaattgttttggccaaaatgctgtatgaacaatgtagcccaagctgaagttgtctcaggtggagatgaagaacttattgggaactggagcacaggtcactcttgctatgctttagcaaagagacttatcactttaactaaaagtgatagcactatccatttcaaagacaaattttattacatcatgaaagtaaagtaaaaaattaattggaattgtgccttatgaaaatggagtcaaagtatttttccctatttctacttctaagaccaactaaaaatcctggctattacatgtcaaacaaacagaatcctgtaaaagatttaaaaaaaaaaccagaaaaagtaaaaaaatacaagtaatgacacagaagtaagatctctggattttattttgccatgtatatctcataattggtgtgggtaaactggactggtaacccacccagcatggccaaggggttcagaacaaaaacagaaagcttcaagaaaaattgatctgtttagccaaaaggccaagaaagggacatcctagcaagtcagaacattttcatacaataatcactctacctacccatgcaccacaatgtttgagggaggaagtagcccctattcccaatgcaccagtgaatacctactgggtaaccaaagcttacacccttaccaggcagaaattaggcacccccacctgtccttttgggatggtgacataacaggttgaataggaagtcacaacttagcagtgtcagaacagtctatgtggtaagcctggacttctactccttccttgcagtaaaagtcagtgatatggtttgccaaatcacattttaatctcagacattttaatctcagtgattaacattcactcaatgccaaaatgtcatcttccattgtaatccccacaatacccaggtgtcaatggtgggatcaggtggaggtaattggatcatgggggtggtttcccctggtgctgtatttgtgataatgagtgattcttatgagatctgatggttttataagaatctggcatttcacctgcaagcactcactctgttctgctgccctgtgaagaaggtgcctgcttctcctttgccttctgccttgattgtaagattcctgaggcttccccagcaatgtggaactgtgagtcaattaaacttctttcctttataaattacccagtcttgggaatttcttcatagccatgtgaaaatggactaatacaacaaattggcaccacatgctttatagtggcaccagagagtgggatgccactgtaaagatacccaaaaatgtggaagtgactttggaactgggtaacaggcagggattggaacagtttggagggctcagaagaagataggaaaatgtaggaaagtttggaacttcatacatgtttgttgaattgttttggtcaaaatgctgtatgaacaatgtagcccaggctgaagttgtcttagatggagatgaagaacttattgggaactggagcaaaggtcactcttgctatgctttagcaaagagacttatggcattttgcccctgccctcgagatctatggaactttgaacttgagagaaatgatttagggtatctgaaatgatttagggtatctgagggaagaaatttctaagtggcaaagcatttaagaaatgatctgagtgctcttaaaagcattcagttccatgaattctcaaaaaaagatggtttggaattggaacttaggtttaaaggagaagcagagcatacaagtttggaaaatttgcaggctgataatgaaatagaaaagaaaaatccattttctggggataaattcaagccagctgaatgaatttgcatatataataaggaggcaaatgttaatcgctgagataataggaaaaatgtctccaggacatgacagagacttttgtggcagcacctccaattacaggcttgaagacctaggagaaaaaaaattggttttgtggactaagcccaggtccttgctgctttatgtagtcttgggacttggtgctctgcatcccagccatggccaaaaggggtcaacttacagttcaggctgttgtttcagagggtgcaagccccaagccttggacactcacacaaggtattgagcctttgggtgcacagaagtcaagaactgagatttgggaacatctgcctacgtttcagagaatgcatggaaatgcctagatgtccaggcagaagtttgctgagggttggggccctcatggagaacatctgctagggcagtgaggaagggatatgtgggattggagccccaacacagagtccccattgggtcactgcctagtggagctttgagaagatggccactgtcctccaaaccacaggatggtagatccaccaaccgcttgcatcatgcacttggaaaagccacagacactcaataccagcccacaaaagcagctgggaggggggccataccctgcaaagccacaggagcagagctgcccaagaccataggaacactcctgttgcatcagcgtgacctggatgtgagacactgagtcaaaggagatcattttggaactttagtgtttaatggttgccctattggattttggacttgcatgaggcctgcagctcctttgttttggccagtatttcccatttggaacaggcatgtttacccaatgcctgcacccccattgtatctaggaagtaacctaacttgcttttggttttacaggctcataagtggaagggacttgccttgtctcagatgaaactttggacttggatttttgggttaatgctagaatgagttaagacattgttagactgtttggaaggcatgattgtgttttgaaatgtgaggacatgagatttgggaggggtcggggtggcatgatatggtttggctgtgtcctcacccaaaatgtcatcttgagttgtaagtcccataatccccacatgtcaagggtgggaccaggtggtggtaattggatcatgggaatggttccctacatgtttttttcatgatagtgagtctcaggacatctgaagtttttatgagtgtctggcatttcccctgcttgcactcccttcatcctgccacactgtgaagaaggttcctacttctttttttgccttccaccataattgtaagtttcccgaggcctcatcagccatgtgtaactgtgaatcaattaaaattctttcttttgtaaattactcagtcttgggtattccttcatagcagtgtgagaacagactaatataggcagcatacactgttctggtaccaaagtggtatcagagaaggccagctaaaatagtgtgtttaaataaggtccacagtacttaaaatatccagattttattcaaaaagtcattaatcataccagaaccaggaatatcttaagtgagaaagaaaacaaaatgaccgaggtgtgttgacaaaaagatactaattctgtaaaatatttgaagagatttattctgagccaaataggagtgaccatggcccgtgacacagacttaggaggtcctgagaacatatgcccaaggtggttggggtgcagcttggttttataaattttagggaggcttgagacatcaatcaaataaatttaagaaatacattggtttggtccagaaaggcaggacaagtcaaagagggggcttccagactgtaggtaaatttaaacattttctcgttgaccatcagctgagtttgtccatacacctgtggtcatagaaaggaaatgttcaggttaagataaaggattgtgaagaccaaggtttttttgaagtcttatagtgcttcccttagtgacaatagatggtaaatgtttcctcccttagtgacaatagatgacaaatgtttcctactcagattcttagaagttactaggcttttatttcatctctttaagattaggagggcccgaagaaaaatatctagctatgttaatagggattattttcaaatgaaaattcacccccccccaacaaaggacaactttgcatggccatttcaagatatggcaaaggaacatgttttagggtaaaatattttgactttcttatttgtcacataatgttatgccagagtcagattagaaattaagtcataatatgcagggttaaataaaacccatctgatgagaattaatggtttttagggcatgacaccccggacctcttacataggaatttgggaaagaaaaaatatcagagcttagtgctcaggtgttagaatcatctgacaaagattttaaagcagtaacaaaaaatgatttaaatagtgtatcagtccattttcatactgctatgaaaaattacccgagacttggtaatttataaaggaaagaggtttaatggactcacagtttcacattgctggggaggcctcataatcatggtggaaggtgaaggaggagcaaagtcatgtcttacatggcaccaggcaagagaaaattgcagggaaactgccctgtataaaaccatcagatctcctgagacttattcactataattagatcagcatgggaaaaacttacccccatgattcagattcaattatctcccaccaggtccttcccatgaaaaggggggattatgggagctacaattaaagatgagatctgggtggggacacagcgaaaccatatcaaagagcaattatatacataattaaaacaaatgaaaacatacaaagtctcagcaaagaaatagaagatataatagggctgggcatggtggcttatgcctgtaatcccaccactttgggaggccaaggcaggaggattacacatggtcaagagtttgagaccagcctggccaatatggtaaaaccctgtcactactaaaattacaaaaattatccaggtgtggttgtgggcacctgtaatcccagctacttgggaagctgaggcaggagaatcacttgaacctgggaggcagagggtgcagtgagccaagattgtgccattgcactccagcctggatgacagagcaagactccatctcaaaaaaaaaataaataaataaaaataaaaaatagaagatataatagaagaaaccatacatatgaagccaaaattgattcaactaaaaagtaaaatagacatatccacaactacagttggagatttcaatatccctttctcaacatttgagtaaatgagacaaaaaattggaaggctgtagaaaaactcaatagtatcattaagaaacaggatctgatagatatttatcaaaccttcaacacaaaacaacagaatacatattctttctaaatgcctgtaaatatgtaccaacatagaccatattctgagcaactaaaccattctatgctcaaacaaaaagatccaacaaaattgttaaaccatttaaaagaattatagagtgttatagagtaaaagtatagagtgttatatgaccactggaatcaaaatagaaaccaatcacagaaagaaaacaggaaaatatctaaacccttggagattaaaaaaatatatacttctaaataatccatgggtcagagaggaatgcctcaagggaaatttttaaaaaattgaactgaattaaaaaataaaagtacaacataggaaatttacatgatgcagctaaagcagtactaatatgtacatgtatagcactaaatgttatgttagaaatgtcatcagcccacatcaggagtgcttttcaggatacctagccagcttcctggaaacaaagtcttcactattagcttttttataagttcactttgttgttatactttttcttcttcacagtatgaaattactttcttttcttatatttccattcacattattttttaaatttattttttggttaactgaaactttaaaaaacttatctggtacaaattccaatttaaactttttgtggatagatatttaggatagtaaaaatagagcctggtggtgaatagaaatccctccagagcagcctaatgcaggatagctggcacacttacaccttcctgtgactatgttgatggcctctactgatccatggcactgtttgtgttctaagtggctacacactaaagatatgcccaactgggaagtctgccctgattaatgtccttcacacataaggtacagatggcatggcacttcttgccttaattaatttattagggacgccatatgggaaaaacagctttcctttcaactggaattacttggggaaataaaacgacaacccattgccgtgggactacattaaattatcaaactagctgaagataaaagaaatcaatgaattgcttggacagaagctgtgtgcactggcatctttccattactcctatttttgaaaaccagatagaatgcagtttttcaggtgatgcaacattttaagtgcagaactgtttattagagttgacatcaagtaaaaatattcaagactgagttaataagactgttcagctgaccattaggatgccattgtttaaaattttgtgtaataacaatgtgttggaatgacactggggcaaaagcgtgggtacacaattaagttttaaatctgtgcatttattaatgttttgctctaaatgttacattcgtgcactaggagaaatatacaatctgtgcaattgcttagggagcaaataatcaacatttcttatgtaggtgtaagtaactatgggtattagacttttcctcaaacctgtgtttttcaatctcgagtaattatacaaggaagatgctcaataagtatttgaagagttaaataatcttccaattagtttcaaatttggtggcaaattttcattgccatttcatagttcactaaaggatcatggggttccttttaatgcactctacaagatattatctgactactgctctaagagagttagcagcttaacttgcatgttaatattcatagcaacaagtcctttacactatttttgttttacagtgaattaaaacatcagaaaatctaggccatttcctgaataagttatacaggcacaaagatatatatttgctggaaagcatttatatttatttttcttttctcttatacaaactatcaggtacaaaagcattatatttagaggtgcagaatacacagtaaaatatcttaatttttaaaattgcattatctaactttctacactaatattaaaacgctaaaatctgttgtttgggtatctttttaggaagataaatctatgaggatgtctatgcaatgcaaacaaatcatatttcactgcataactgaacatatggagattaggaacctcataaattgaattttaaatgaactgaccttattggatccttgacaaaagggaaaaagaatgtaccaacaagaatggaaatatattaatggattagatttatcacgagtatcaaataaaataaaatatactctcagataaaaaatatgataatatacagtaattcatattctactggttagtttaccattgacctcttccctctcatacttcccattataaaaatagtgtgcagttattcaagaggtgttgttcagtgtcaggcactgtgctaggtactggatatcgtaagtatgatgaagaaaaaagacaaaggtgctgttctaaaggcacttgctgtaaaatggaactgccagcaaataagacattaaaatcaggtgcaaccatcatagtgatagccaatatatagaaactatgggaacaaaggaataacatttaacttctgctgccgaagagaaattgtattaggcagagacttgatggaagcgtaatcacatgaagaaaaggcagtgttcaaggcagaagaaacagcataaacaaaagcctaaagggaaaatagagctgtggatacttctggaactgcaaatagatttacatgatagggaaatccccaggctaaggatgataagatgagatagaaataatctgcaggtggatgagacgataaaaggctatttgaaccatatataattgtattgtgtatgcgtgtgtgtgtgtgtgtgtgtgtgtgtgatttactttagatctgcactcaatgcatttagtattttgccccgtggtgatattcattattacttactaaaagatgaattaaaactgaataatattgccaacacattaggcaagtattgtaaaattggactacttttgccaaccatgtatgaaataggccacaagcattcacaatacaaagttgcagattttctaaatgttttataataaatcaccaaagaggcactcggggtggccatttacaaatattaagaacaaaatggttttataggcaaacatgaacaatgaagaatgaattcaaaattagaaaccagaaatttcaccatctgctagtctggaactactggtcagttctggaactgcttagtctgaaactgaccttggcaaatatttaagctttcttccactgactccatttctaatgtagagaagcagataattggaggcataaagttatcatgcacagaaagacttgtaactatcttctgctatttcaaggaccactacataagaccctatagtgattttaaattgtttcctttataaataagaatgaagatctgagggtctcagaatagataatttcattgcatgaacttttttctgcatctaaagaatctcttagaaaagtattgggaagaaaggatttgaagagaatactgttcattttttttcccataacaaattaatctccattagatggtgaggttagttaggaagttattcaatagtccaggcaagacgtgatgcatgagggtggtgactgtgagtattgagatagacataattaacaggcggaatcaatcaggtgtagcagccaaatggatttaaggataagaaaaaagaaacacttcaggttgacgctgggatattaactctggtaacgggtgatgctttgattggagttagggaacgtgagagaaggattaatgaattttgcagcaaagttacttcatttattcaatccagtacagctggcttttaggtgtctgcagaatagatcactgaatatgtccaataggaagctggaaaactgactatagagaaataagatggaggagagaaagtgaaggaaataattgtacattttttttcaagtattttgaagatacaattgggcaaaaaatgatacggccatggctgtaagatgtatatccaaggtaggttatatttgtaagtatgtgagaaccataaacatatttcagtatagatggaaagaaaacagtatgaagcggacaattcaggaaaagtaatcgaattgtattatgagatcttttgcaaaggtaaaaggcaatgctgcccaggaggcacctgtggaacttggcttctgacagaaggagagaattcttctcattgttacaagaaataaaaaagcagtatcagaagggtgtatattaggtccagttaagatctgcataaaaaaacaaggtatttttatttgatggcagtaattttctctgtgactagaaggcaagactgaaggtgtgctggtaggatggcgtcttaagaagcaattacttggctttgcagacgccgccgccgaggaaaaccgtgtactattagccatggtcaaccccaccgtgttcttcgacattgccgtcgacggcgagcccttgggccgcgtctcctttgagctgtttgcagacaaggtcccaaagacagcagaaaattttcgtgctctgagcactggagagaaaggatttggttataagggttcctgctttcacagaattattccagggtttatgtgtcagggtggtgacttcacacgccataatggcactggtggcaagtccatctatggggagaaatttgaagatgagaacttcatcctaaagcatacaggtcctggcatcttgtccatggcaaatgctggacccaacacaaatggatcccagtttttcatctgcactgccaagactgagtggttggatggcaagcatgtggtgtttggcaaagtgaaagaaggcatgaatattgtggaggccatggagcgctttgggtccaggaatggcaagaccagcaagaagatcaccattgctgactgtggacaactcgaataagtttgacttgtgttttatcttaaccaccaggtcattccttctgtagctcaggagagcacccctccaccccatttgctcgcagtatcctagaatctttgtgctctcgctgcagttccctttgggttccatgttttccttgttccctcccatgcctagctggattgcagagttaagtttatgattatgaaataaaaactaaataacaaacaaaaaaaaagaagcaattacttagaaaatgttgctgaaaagagagcatacaaagtagactaagagaaggacttgttgggcaattttaagaccccataattagtgagatttgagtctccaatacgttttgttagattttcttcatcagaaggctgtagcccacataaagatttttttttaaaaaggaatataattcaccaataaggttttgatttaacctcagaattctctgtgatttccccccataaattactattgtgaattctgttttaaagtaatatttaattatcacatacaaagctgaccttaacattatttgctaaaatataatttctagaattaccttcatatcacatatgtgatggttaattttacatgtcaacttggctggatcacagtgtgtagatatgcgatcagatattattctggatattttgcgcggatgtttttgatgagattagcatctaagttggtagactttgagtaaagaagattgccctccataatgcatgtggggcctcacccaatcaattgaaggtctgcatagaaaacaaggctaacccacgttgaacaagaagtagttctgccaggagacagctttcagatgtgaatggtaacatgggctcttcccagaaactccagcctgtcagcctatcctgcagattttagacttgccaacttccacaactgcatgaaccatttccttaagatacgtttctatatatatatatatatatatatatgtatatatatatatatatatatatatatatatgtatatatatatatatatatatatatatatacacacatatcccattgattctgtttctctggagaactccaggtaacataaaatatttacaatttgcttacacatctgtttcttcatttttggatttatttcacttgcttcattttgctaatttttcttttgtgtgtggaagaatataaatttccttgagaggctgaggtggaagaactgtttgagcccaggagtttgagattatattgagctgtgatcatgctactgcactccagcccgggcaagagagccacagcctgtctcttaaacaaaagtgaatttccatttagaaacattttactaattagtgaaagaaatgttaattgtctattattctccttaatattatccttaagcagaagatctccaccaaattgctgtaacatttttaaagtgttgttttcattcaagacagaaaatctttccagatttctctctgtgttttctttacgttatttaaaaatgctcaattttataatttatttcaaattatattcgacaaaatttagctcctacttttaaagaccaaataggtcaacagtgttgattttgcagtattctttgaatgaattactaaaatatttagcatatgccaaagacatctggcaaagagattgtataaaaataaatgttcagagacggaaaccaatgttataaaactgggccattcactgggcatgtataagcataagcacattttcatatattttctgtttccataattttatgaaagtaattaataatttctccagtaacaactaataatgagcaatggtacagagaccaatgaattattgataagaaaaataatttatgagaatgcatttcctattttgtctacttaattttgctttgaaaattctcaatcttatagaagcatacaaaattcagcagaataatttatttcagtcacaaaatttctcaaaattaatttaaaaaataaatgtgtctgagttaaattaattttcatcagcattaaacctgataaacaacatggcatgtttaatttatgctttgattttttatatagcatcaagtttttagaccaaataatctgttaattattgtaaattatatagcactttgcatattactcttttgtgtaaaatcattcacaagctatttttttgaagtattcaacttttttccattagacaccttccaaaaacagccatttttatatggcctcttaagttttcccattattcattatttaattagcttcttctttttactttgaatctattcattaatttatgattcataagtttgaaggcagaaatattgctccacttatcttttgtcctggtttctaacgattaaaaatttgtccttattcatagtagtcatagccttacaacaacttaaggcctaagttattattaccttaatttaaagatacaactttattgtttaaatcataaaacattcttataaatgcatgtggggtatattttccccaggttttctcaagaagtagataatactttgttagcaacattggtatacgaatattgacatccactaacttaccaagagaacttgaacctctacttagaaaagattatttccaaacaatttgatagtatttctctaatctggtttactttatctttcttctacttctgccatcttcatgaggacattagcattattgttccctcagctattaaaaaaagtaaaattttaaattaacaatcaaaagaaatatgccatttgtgggaaaaactatttatttctattcttgtcacataacactttaaaaaacacaatggtttcaaatcatgaaaccacctggtatctcttgcacgtagctcaatcactcacatctaataagaaccaaatggcatggtggcaggtgcctgtagtcccagctacttgggaggctgaggcaggagaattgcttgaacccgggaggtagaggttgcagtgagccgagatggtgccactgcactccagcccgggcgacacagggagattccgtctcaaaaaataaaaagaaccaaatgaatactttttgtataaactaagtttatagaattttagagaaaatatgtgtaaacatctttgtttttttccacagaggtagtcaatagtataaaaagtgcattaaagatattcgttattatattagagagtaaaaatgtaaaacattgaaatccattttaaagaaatattaagggcttttatctacaaaataacttgtattattttctttgaaataaattaaaattagcaggactttttattagcttttatttacttaaaagttagtgggcactttttaattcaaaccacaatttaaaaccagcatctaaaacagatgaggagtttggggaaagtatattaatgtacccttcattccaatgaaaagtatgtttccacaatttattttacctattcttttcttttgttagtaggctcaaatatgtcaatagatataattaaagtttatatcacagtaatagcactgctatagagtctttgtataggagagtcaaaagagacactttgatgaggatatgaaagggttgaaaaagctctaaatagctttgtttacaaaggaacagactaaataaaaaggagacattagcttgtgaagaacatggttggaaccatttgaagtacattatttatttaagagaaaagaatagtcttttaaaatttatttttaacccaggttaagtgtcttaaaaaagaaaacaaaataacttcatctgctaaataggtgaaaatttcctataatattatttttggcattctagaatttttttccactttctactgtatcacaacttattttactttacagtgatcaattccaatagcatgcaatgtaaggacgattatttttctgtcttaaaaaagtcttttctcttaccttgcttttctcaccatgcatttcttgtttgctccccttagcagcaaaacttcttgtaaaatatgcattctcttcaattatttcattctctcttgaatctgttcaacttgctctcacctccacccgtacatggtaactgctacaccttcattttactaaattagctcttcctttcccttctcagttccacatcaatatacattcagcagcactcactccaccctgcttgaatgaatttccttcgcttggcttgcaagactccaacatgctctctcagcttccctgctgccttgctgttactctagctctctcttactggttcaccctcttcctccaatctctaaacattcagtagttagcggtagggctagcattaaggttagggttaggattctgcctttgtgctttctctcttctaggtagcctcatacacttaatgatcccatccagttttacagctttacatacaatctctgccaacaattcccaaatatatacatccagtatgtctcccttctgaattccagccccacgtgtgccagttcaatatccatgctttgacgattagcaggcatctcagagagaaccaattaacccatgaaaaattaaaccatgatcttccattcccctaaatctgctttcccccttggtgatttcattgctcaaggcagaagttcagtcttcttttcctgccatatgccacatcacattccccaggaattaaaccttggctcttccttcagaatacattccaaactggaccaactcttactctattcaagtagcatttcttacctggaagacttcaataaccttcaaaaaagtcttcatttgtttcccttcacctctttcagtctattcttaacaatatggaaaaatgatccttaaaaaataaagataaataagataaactgacttgaaaccatagtgtcaagataaaattccaatacaacagaatagatatgatctcacccagatcctatgactttgagaagatgtctggataagatctccacacactgaaagccataaccatttattggattctgtagtcagatatcaaaagtgttagcatcagcttatatttttcaaaaagcagaaacataaaaattagagagttaatttacattagctgcaaaggtaaacaatgcaaattaaactgtcttcattataaatttattatttttattttaattggtcactgagaaaactgacctgatggagctaaaagcatgtctttggccagtttctcattaagttcaagtctgtatgacattctgaccttcctttttcttgacaaagttagaattcaaggaaaatactagaaattctgctttctgattcatccatgaaaaaatgtgtctcaattattgtgccaaacatcagcacataaacttaaacaaatctttgacatatagaatgtaacctacactatgacatcagtattgtgttaagaaatgaacccagttttaagaaaatattgtatcattattatagtgctaactaaactttaatagacaaaagttgatataaatttaaaaacaagattcaatgtcttgttgacattacatgagagaagcagtaagctctagagcgaggataagtttgtagtcagaagatctggaattgtatactagttttctactctaggagaaagaaaatataatatgatataacttttcttatctgttttacataactcataggattgagaggagcaatttaccattaattttggaaaaataatacagttgtaacagtttattatgtaagtgaatattatatctaagctttctttaacttttgttttaggcttagggtacatgtgcagttttgtaatataggtagatttatattatgggggtttgttgtacagattatttagttacctaggtacgaagcctaatacccaatagtaattttttatgatcctttccctcttcccaccctacaccctcaagtaggccccagtccctgtttttcccctctttgtgtctatgtgttctcatcatttagctcccacttataagggagaacatgcaatatttgattttctgttcctgtgttggtttgctaaggataatggcctccagctttatccttgttactataaaggacatgatctcattcttttttatgtctgcatagtattccatggatgtatatgtaccccattttctttatgtaatctgccattgatggatatttcatttgattccacatctttgctactataaatagtgctgcaatgaacatatgtgtgcatatatcttcataatagaacaatttatattcctgtgagtgtatacccaataatgagattcctgagtcaaatggtaattctgtttttagctctttgaggaatcatcaaactgcttctcacaatggctgaactaatatacactcccaccaacagtgtataaaaattccctttctgcacaacctgtcccacatctgttaatttttttactttttaataatagccattctgactggtatgagatggtatttcactgtagttttgatttgcatttctctaatgatcaatgatgttgaactgtttttcatattatttttggctacatgtatgtctttttttgaaaaattgtctggtcatgtctttgcacactttttaatttttttttgtaaatttgtgtaagttctttatagatgctggatattagacctacgtcagatccatagcttgcaaatattttctcccattctgtaggttgcctctttactctgttgatagtttattttgctgtgtagaagctctttagtttaattagatcctatttgtcaatttttgcttttgttgcgattgcttttggagtcttcatcataaactctttgttcctatgtacaaaatgatattgcctaggtagtcttacagggttttcatagttttgagttttacatttacatctttaatccatttttagttgatttatgcatatagtgtaagaaaggggtccagtttcaatcctctgcatatgattagccagttttaccagcaccatttattgcataggaagtcttttccccattgcctatttttgtcagctttatcaaagctgattgttataggtgtgcagccttatttctgccttctctattctgttccattggtctatatgtttgttttagttccagtacttatatggcttggctatgccctgcccaaaatctcatcttgaattgtcatctccataatccccacgtatcaaggatgggaccagttggagatgattggatcatgggggtggtttgccccatgctcttctggtggtagcgagtgagtctcatagaatctgatggtttttaagggtcttgcatttcccctgctttcactcactctgtcctgctgcactgtgaagaaggtgcctgcttctcctttgccttcctccataattccaagtttcctgaggcctcccaagcaatgtgaaactgtgagtcaattgaaactctttcctttacaagttacccagtcttgggtattttcttcatagcagtttgagattggactaatacaagtagcatgctgttttggctactgtagccctttagtatactttgaagtcaggtactatgatgcatccagctttgttccttttacttggaattgccttagctatttgggttctttcatggttgcatatcaattttaaaatatttttttctagtactgtgaagaatgtcattggtagtttgataggagtagcactgaatctgtacattgctttgagcagaatggtttaatgttactgatttttcctatccatgagtatggaacattttgccgtttttggtgtatctctgatttctttgaacagtgtttgtaattctcatcatagagatgtttcacttacctggttagctatattcctaggtattttattctttttatggaatttgtgaatgggattgcattcctgatttggttcttggcttgcctgttgttggtatataggaatgctagtatctttttgtttttgtttttgtttttgttttttgacagagttttgctctgtcacccaggctggagtgcagtggcatgatcttggctcactgctatctctgcctcagggttcaagtgactttcctacctcagcctcccaagtagctaagattacaggcatgtgctactacaatcacacccagatataaatatatattagtatttttactagagatgggatttcaccatgttggccaggctaatgtcgaactcctggcctaaagtgatccacccacctcggcctcccaaattgctgggattacaggcatgagccaccgtgcccagcctaatgctagtgatttttgtactttgattttgtatcctgaaactgctgaagttatttaacagctgaaggggcttttgggttgagactatgtggttttctagatacagaatcatgtcatctgcaagcagggttagtttgacttcaacttttcttatttggttgttccttatttcttactgttgcctgatagttctggccaggaattccaataccatgttgaataggagtggtgagagacagtacccttgtcttttgccagttgttaaggggaatgcttccagcttttgcccattcagtatgatgttggctgtggatctgtcatagatgactcttaatattttgagttatgttccttcaatacctagtttattgagagtatttaatatgaatgaataatgaattttatcaaaagccttttctgcatctattgagataatcatgtgattgtctttagttttgtttatgtgatgaatcacatttattgatttttatacgttgaaccaagcttgcatcctggggatgaagcctgcttgatcatggtggactagctttttaatgtgctgctggatttggtttacaagtattttattgaggatttttgcgtggatgctcatcaaggatgttggcctgaagttttctttttttcctttgtctctgccagattttaatattatgacaacgctggcctcatagaatgagttgaggagggttcctcctcctcaatattttagaatagtttcaatagaaatggcatcaacttttcttagtacatctagaagaatttggctgtgaatctatctggtcttgggctttttttttttttttttttttttttgatggtaggctgtttattactggttcaatgtcagagttcatgattgttctgttcagagaatcaagtgctttgttgttcagccttgggatagcgtgtgtctaggaatttattcatctgtcttctaggttttctagtttgttttcacagaggtattcctctgtggtcagtggtaacatcgcctttgtcatttctaattatatttatttggatcttctctcatttcttctttattagtctagctagtggcctattttaattttttcaaaaaaaatcaactggattcattgagcttttgaatggatttgtgtcttaatcttctagtttggctctttttttttttcttgtcttctgctagctttgggattggtttgctcttgattctctacttcttctagttgtgatgttaggttgttaatctgagatctttctacattttttatgtggggaattagtgctataaatttccctcttaacactcactgccttagctgtgtccttggtattctggtgtgttgcatctttgttctcatgtacttcctgatttcttcatttcatgctttaccaaaaagtcattcaggagcaggttgtttaatttccatataatttcatggttttgagtgattttttttgtcttgatttctatttttattgtgctgtggtccaagagtgagttatttgctgagggttgttttatatccaattgtgtggtcacttttagactaggtgtcatgtggtggtaagaagaatatatattccattgttttggggtagagagttctgtacgggtctatcaaatccatttgagttcaggtcttaaatatctatattaatttttttcctcaatgatatgtttaatactgtcagcagagtgttaatgcccttcactattattgtgagtgagtgtaagtttctttgtaggttctaaaaacttgctttatgaatctgagtgctcctgtgttggatgcatttatatttagaatagttaagtcttgtagaatttcaacaaccctttatgattatgtaattcccttctttgtccttttttaatttttgtttatttaaaggctattttgtctgaaattagcattgcaacccttgcttgtttctgattttcatttacttatagatttttctctattcctttattttgagcccatgaatgtcattatgtgtgagatgggtttcttgaagacagcttactattgggtcttgttattttatccagcttgccactctgtcttttaaatgggggtatgtacaaacaactccaccaactggacgaaactataacttgttgacagctttctctctctggttctcagatgaggaatgatgataaaacaaaaccaaaaggcatcttattgaggaaggtcagctccagtggatttctttgagacaacccaagttagatggagctagcgggaaaaaatacagtaattctttaaactatcattcaagcaaaacctgtgacctaagtgttccttttaaagtagctagacttgttagagattttattgagtggatataagcactttatacagaaacttttttttaaaaaatgtacaccgtcttttcatagaacagaggaacagctgtcacatcagttcccgatgccaagcacagcaatataaagtatataccctacgagttagatgaagcagaggaaagggatcaagagattaatatacctctttgagaaaagcacccaaaataaatcattttattattttttgcaaaaataaataaataaataaataaatgggggcatttagcccatttacattcatggttagtattgacatgtgtaattctgatcttgtcattgtgttattagctggatattatgccagcttgtttgtatggttgctttatagtgacactggtctttgtacttcagtgtgtttttgtattggctgataatggtctttcctttccatattgaaaactctttttaatatctcttctaagatgcatctggtgctaatgaccttactcagcatttatttatctaaaaatgatcgtatttttccttcactgaataagtgtagtttgcctggatatgaaattcttggttgagaatacatttttttctgtaagaatgctgaatataggcccccaattttttctggcttgtaaggtttctgctgaaaggtctgctgttagcctaatggggttccctttgtaggggacctaccctttctttctagctgcctttaacattttttttcatttcagcttttaaaaataagaagattatgtgtcctgggaatgatcttctcatgtaggatatttcaggggtttcctgaggccagatgtggtggctcacacctgtaatccctgaactttgggagggcaaggtgggcagaccacttgaagtcaggagtttgagaccagcctggtcaacatggcaaaaccttgtctccactaaaaatacaaccaaaaaaaaattaactgggcatgttggtgcacacttgtaatcccggctacttgggaggctgaggcatgagaatcacttgaacccgggaggtgaaggttgcagtgagccaagattgtgccactacactccagcctgagtgacagagcaaggctctgtttctaaataattataaccataatcataatcacaatcaatcacaaatgagactattacaggggttatctgtattttctgaatttgactgttgaactctctagggaaactgggcatattttcagggaaaataccttgaaatgtgttttcttttttttttttaatttttaaatttattttattattattatactttacgttttagggtacatgtgcacaatgtgcaggttagttacatatgtatacatgtgccatgctggtgcactgcacccactaactcgtcatctagcattaggtatatctcccaatgccatccctccccgctccccccaccccacaacagtccccagagtgtgatgttccccttcctgtgtccatgtgttctcattgttcaattcccacctatgagtgagaatatgcggtgtttggatttttgttcttgcgatagtttactgagaatgatgatttccaatttcatccatgtccctacaaaggacatgaactcttcattttttatggctgcatagtattccatggtgtatatgtgccacattttcttaatccagtctatcattgttggacatttgggttggttccaagtctttgctattgtgaataatgccgcaataaacatacgtgtgcatgtgtctttatagcagcacgatttatagtcctttgggtatatacccagtaatgggatggctgggtcaaatggtatttctagttctagatccctgaggaattgccacactgacttccacagtggttgaactagtttacagtcccaccaacagtgtaaaagtgttcctatttctccacatcctctccagcacctgttgtttcctgactttttaatgattgccattctaactggtgtaaaatggtatctcattgtggttttgatttgcatttctctgatggccagtgatgatgagcattttttcatgtgttttttggctgcgtaaatgtcttcttttgagaagtgtctgttcatgtcatttgcccactttttgatggggttgtttgtttttttcttgtaaatttgtttgagttcattgtagattctggatattagccctttatcagatgagtaagttgcgaaaattttctcccattttgtaggttgcctgttcactctgttggtagtttcttttgctgtgcagaagctctttagtttaattagatcccatttgtcaattttggcttttgttgccattgcttttggtgttttagacatgaagtccttgcccatgcctatgtcctgaatggtaatgcctaggttttcttctagggcttttatggttttaggtctaacgtttaagtctttaatccatcttgaattgatttttgtataaggtgtaaggaagggatccagtttcagctttctacatatggttagccagctttcccagcaccatttattaaatagggaatcctttccccattgcttgtttttctcaggtttgtcaaagatcagatagttgtagatatgtggtgttatttctgagggctctgttctgttccattgatctatatctctgttttggtaccagtaccatgctgttttggttattgtagccttgtagtatagtttgaagtcaggtagtgtgatgcctccagctttgttcttttggctcaggattgacttggcaatgtgggctcttttttggttccatatgaactttaaagtagttttttccaattctgtgaagaaagtcattggtagcttgatggggatggcattgaatctataaattaccttgggcagtatggccattttcatgatattgattcttcctacccatgagcatggaatgttcttccatttgtttgtatcctcttttatttcattgagcagtggtttgtagttctccttgaagaggtccttcacatcccttgtaagttgggttcctaggtattttattctctttgaagcaattgtgaatgggagtttcctcatgatttggctctctgtttgtctgttgttggtgtataggaatgcttgtgatttttgtacattgattttgtatcctgagactttgctgaagttgcttatcagcttaaggagattttgggctgagacaatggggttttctagatatacaatcatgtcatctgcaaacagggacaatttgacttcctcttttcctagttgaataccctttatttccttctcctgcctaattgccctggccagaacttccaacactatgttgaaaaggagtggtgagagagggcatccctgtcttgtgccagttttcaaagggaatgcttccagtttttgcccattcagtatgatattggctgtgggtttgtcatagatagctcttattattttgagatatgtcccatcaatacctaatttattgagagtttttagcatgaaggttgttgaattttgtcaaaggccttttctgcatctatggagataatcatgtggtttttgtctttggttctgtttatatgctggattacatttattgatttgtgtatattgaaccagccttgcatcccagggatgaagcccacttgatcatggtggataagctttttgatgtgctgctggattcggtttgccagtattttattgaggatttttgcatcaatgttcatcaaggatattggtctaaaattctcttttttggttgtgtctctgcctggctttggtatcaggatgatgctggcctcataaaatgagttagggaggattccctctttttctattgattggaatagtttcagaaggaatggtaccagttcctccttgtacctctggtagaatttggctgtgaatccatctggtcctggaatctttttgttagtaagctattgattattgccacaatttcagatcctgttattggtctattcagagattcaactgcttcctggtttagtcttgggagagtgtatgtgtcgaggaatttatccatttcttctagattttctagtttatttgtgtagaggtgtttgtagtattctctgatggtagtttgtatttctgtgggatcggtggtgatatcccctttatcattttttattgcgtctatttgattcttctctgtttttttctttattagtcttgctagtggtctatcagttttgttgatgctttcagaaaaccagctcctggattcgttaattttttgaagggttttttgtgtctctatttccttcagttctgctctgattttagttatttcttgccttctgctagcttttgaatgtgtttgctcttgcttttctagttcttttaattgtgatgttagggtgtcaattttggatctttcctgctttctcttgtgggcatttagtgctataaatttccctctacacactgctttgaatgtgtcccagagattctggtatgttgtgtctttgttctcgttggcttcaaagaacatttttatttctgccttcatttcgttatgtacccagtagtcattcaggagcaggttgttcagtttccatgtagttgagcggttttgtgtgagattcttaatcctgagttctagtttgattgcactgtggtctgagagatagtttgttataatttctgttcttttacatttgctgaggagagctttacttcgaactatgcggtcaattttggaataggtgtgctgtggtgctgaaaaaaatgtatattctgttgatttggggtggagagttctgtagatgtctattaggtccacttggtgcagagctgagttcaattcctgggtattcttgttgactttctgtctcattgatctgtctaatgttgacagtgggttgttaaagtctcccattattaatgtgtgggagtctaagtctctttgtaggtcactcaggacttgctttatgaatctgggtgctcctgtattgggtgcatatatatttaggatagttagctcttcttgttgaattgatccctttaccattaagtaatggccttctttgtctcttttgatctttgttggtttaaagtctgttttgtcagagactaggattgcaacccctgcctttttttgttttccattggcttggtagatcttcctccatccttttattttgagcctatgtgtgtctctgcacgtgagatgggtttcctgaatacagcacactgatgggtcttgactctttatccaatttgccagtctgtgtcttttaattggagcatttagtccatttacatttaaagttaatattgttatgtgtgaatctgatcctgtcattatgatgttagctggttattttgctcattagttgatgcagtttcttcctagtctcgatggtctttacattttggcatgattttgcagcggctggtaccagttgttcctttccatgtttagtgcttccttcaggagctcttttagggcaggcctggtggtgacaaaatctctcagcagttgcttgtctgtaaagtattttatttctccttcacttatgaagcttagtttggctggatatgaaattctgggttgaaaattcttttctttaagaatgttgaatattggcccccactctcttctggcttgtagagtttctgccgagatatctgctgttagtctgatgggcttccctttgagggtaacccaacctttctctctggctgcccttaacattttttcctttgtttcaactttggtgaatctgacaattatgtgtcttggagttgctcttctcgaggagtatctttgtggtgttctctgtatttcctgaatctgaatgttggcttgccttgctagattggggaagttctcctggataatatcctgcagagtgttttccaacttggttccattctccccgtcactttcaggtacaccaatcagatgtagatttggtcttttcacatagtcccatatttcttggaggctttgctcgtttctttttattcttttttctctaaacttctcttctcgcttcatttcattcatttcatcttccattgctcataccctttcttccagttgatcgcattggctcctgaggcttctgcattcttcacgtagttctcgagccttggttttcagctccatcagctcctttaagcacttctctgtattggttattctagttatacattcttctaaatttttttcaaagttttcaacttctttgcctttggtttgaatgtcctcccgtagctcagagtaatttgatcgtctgaagccttcttctctcagctcgtcaaagtcattctccgtccagctttgttccgttgctggtgaggaactgcattcctttggaggaggagaggcgctctgctttttagagtttccagtttttctgctctgttttttccccatctttgtggttttatctacttttggtctttgatgatggtgatgtacagatgggtttttggtgtggatgtcctttctgtttgttagttttccttctaacatacaggaccctcagctgcaggtctgttggagtacccagccgtttgaggtgtcagtctgcccctgctggggggtgccttccagttaggctgctcgggggtcaggggtcagggacccacttgaggaggcagtctgcccgttctcagatctctagctgcgtgctgggagaaccactgctctcttcaaagctgtcagacagggacatttaagtctgcagaggttactgctatcttttggtttgtctgtgccctgcctccagaggtggagcctacagaggcaggcaggcctccttgagctgtggtgggctttacccagttccagcttccccgctgctttgtttacttaagcaagcctgggcaatggcgggtgcccctcccccagcctcgctgctgccttgcagtttgatctcagactgctgtgctagcaatcagccagactccgtgggcgtaggaccctccgagccatgtgcgggatataatctcctggtgtgccgttttttaagcccgtcggaaaagcgcagtattcgggtgggagtgacctgattttccaggtgccctctgtcaccactttctttgactaggaaagggaactccctgaccccttgcgcttcccaagcgaggcaatgcctcgccctgcttcggctcgcgaacagtgcacgcatccactgacctacgcccactgtctggcactccctagtgagatgaacccagtacctcagatggaaatgcagaaatcatccatcttctgtgtcgctcacgctgggagctgtagaccggagctgttcctattcagccatcttggctcctccgctctgaaatgtgttttctaacttgtatgtttctccctgtccctttcagggattgcaatgatttatagatttccctctttacataatcccatatttctcagaggttttgtttgttcctttttattcttttttatttgattttgtctgactgtcttatttcagagagccaatcttcaagttctgaggttccttcctcagcttggcttattctgctgttaatatttgtgattgcattgtaaaattcttgtagagtggttttcagctctatcagattacttagcttcttttttatattggctaatttttctgtcctatattgttttattgtgattcttattttgcttgaattgggttttgccatactcttgaatattgataatcttaatttctatccatattctgaattatatttctgacatttcagccaactcggcctggttaagaatcctctttggggaaccagtgtgatcatttggaggacataagacaccctggccatttgagttgctggagttcttgtgttggttctttctcatgtctacgtgtgggtatttctttgactgctgggttgcctctaattaaagtggtcaggcagaggaagagtggttgtgttggagtcccaggctcagcagccctgctcagtgagaagtgaggaccaggacctatgtggagcacagtctggccacttttccatgaggtgggtgctttgtgctgggagtccagatcagcccctggtccccatggctctctggaacctgaagacagcaagggcaagggctgtgagacggaaaacatggtaacccatctatattagttcattcttgcactgctttaaaaaagtacctgaaactgtgtaatttataaagaaaacacatgtaattggctcacggttctgcaagctgtgcaggtaggatggctgggcaggcctcaggaaactttcaatcatggcagaaggtgaagcggaagcaggcatgtcttacatggctggagaagaaggaatagagagaaaggggaggtgctacacagttttaaataagtagatcttatgagaactcactcactattacaaaaacagcaagggggaagtctgcctccatgattcattctcctcccaccaggcacctcctccaacactggggataacagttagacacaagaattggacaggaacacaaatccaaactgtatcaccatccctccctctgggagctctgtctcagggagttgcagagctgatactggctctatagccccagctggggagtggcaggaaagccaagcagagaggacttgcccagtgaggagacacaaaactggggacccatgttacaaatagtctggctgctgcaatatcctggggggcctctccagtccttagtcacctcatattttctagcacctgaaggtatccacagtgaaggctgtaaagccacaaagatggtggccttcccctccctctgggggctccatcccagagaggtacatacctgctgtaccccaaatgcacctgcaggagctagttagagaccccatgagggagatcccacccagtgaggaaaaatgggatccgggacccaggtgaaaaagcagtctgtctgcctctctgtagagctgctgtgctgggggactgctccagtctctagctgccttggactccctagagcccaaaggcaacaatggctctagctaaggctgtgaaacagcaaatatggcagcctgccccttcccctgggagccccatctcagggaggtgtaatgctgctaccaccagtggctggctggagttagaagccactgggtcttatcctgtgaggggccttgtaaggggggcctgcagaccatagctgctcagccccctggattcagtttgtttcctaggagtatgcgcaggagtctaacttctcactttgctggagttgcagctgctttttctgggaagccgagatatttaaagctcctggggctccacgtgtgcctgaacagctgctctgccaagactccacacagcactgcgtgtcagactgcagaccctggtggagtgtgttcataacggaatctcctgacctgagggttgcagagaaccgtaggagaagtgcgggcccccagggttgcttactcactcaccatttccctgggcaggcgaggctcccctggctccgtgtgactgtcaggtgggcagttgtcctgtcttccctccattctctgtgggttattttcttgatgaatcccatgtgtttacaaggatgttgaaggtgctgtattcacttcctctttctatttttctccatgagagaaaggcatactagctgcttctagctggccaccttggcaagtctcttttctaagtatttttacagtatatataatctttgtttacttttaaaagaggactcatatctcaaatgcagcttcctttgattattgtggaataaagtagaaaaaaaatggaatggaaaggagaaaaggaggaataaatatatctaaacatataagatatttctaagcattttctgatatatgctattatacgtgtaacaatagtttccctacttaaaaataattttaaaaattggctttgataaaaagcacagtaaagtaatactagtagtcacttcaagaaatcttcttggtcttttgtttccaatttctgatgtatgtgcatttaatcctccaatatatacatagaaataaagtgaatgaatggataaactaattataataaacaggcatgggcatagccaaacataatactctatcacttctcattaaaaatattctaagagaaaacttgagatttaaatatgtaaatagtcacactgattgttttttatttttaggaagtaagcaaatcatataggctacaagagtaataatgtttaatttaggagacaatggcagagttcctcaaaaagaactgtaaaatatcacacaaaaactatttttggaaattaataaaagattataatttatgtgtaataatcataaattcttttccccacatagaatgcagcactgaagatttaaagcatgtaaacaccttatcagtaaattctttataatcaatatgaagagatatattatacatagaaaataacctaaaatttaagaattgttgaattctgtggagaactataaaaatataatgtgttaatgttaataataattaccaaattgtaggtgcttttaagattcagtggaagtaatgaactgaacatggtgctagatagttttacaccaaaatgttacattagttaagaggagagaaggatgtaaaaaataataataataaacaaagggctgggcacagtggctcacgcctgtaatcccagcattttgggaggtcgaggcgggcagaccactttaggtcaggactttgagaccagcctggccaacatgacaaaacccatctctactaaaaatgcaaaaattagctggtggtggtggtgcatgcctctaatcccagctactcgggaggtggggtcagtagatttgctttacccagggggcagaggttgcagtgtgctgagaccatgccattgcattccagcctgggcgacagggtgagactccgtctcaaaaataagtaaataaaataaaataaaaataaacatatttttgtgtcagacagctttatatatgatgaagagaatatttttgcctaaacaaattgtatatggcagtcataagagacacatataaagatttagcctagggagtatttgaaaaggacctgggacaaaaatcttaaaatcagggaagtaaatgaaaagttaataaattactcttggataaaaaaaattatgtatttttataagtctgagcctaaagctctactttcctaaaaagctgggaattaaaatcatccactgaacagactcagtcttcctgtttacgaatgaaagtgagtgatataacctgaatggcactttgttggacaatcttaaataagttattacctgttctgggattttaaaagtccaattaagctgtttctttccagcaagcaaccaagctttaagctaaagcctagtattttctcagtagggttaatgaagaagctcttaaataaaacaagctcctcaataatccctgctggcttttaatgcttcatcttgatgctaaattagttgcagtagcataattcttttagctcttggtcctttggctcacatcaagcctcttgccataaactcttgaaaacataggattttatttaaacaattcttcaaattttctgagttgatattggcctaatttgaaatccatagcccattagactaacatctgaatggcagtgttgttataaattcgtataccccctattttgagagccatagtataagataaatttctaaatattaaaaaagaagccttatagtctaaattgtcaggttatgtttaatatgtaaatattaggagctgtttatgtacaactgtgggtttccaattttagtatatatcagcattatctggtgggttgttaaacacaggttgctaagcctcaaacacaaagcttgtgatttagtgagtttggaatagagttccaaaagttacatcactagaaagttctcaggcaaaactaatgctagtggtgtggagaatacactttgagaaccactactttaaaatattttgactctattagtgttgggatgttaagacagacacttgatatctctgagactcagtttccacttattgaggtattaaaagtattaaaagtaatgaggtatcaaaacattgctttgataagtatgagacaatatgtaaatgattcagcagggattctgcacatagttgataatttgccaatattaactgccactctttccctctctaaagttcaccgttacatagtgcctagccaaacttgtaaaaccaacagaagcaatgcattttaaatagtcttaaatgttccttctggaggaatgggaagaaagatgtcttcaatcaatgcagaggtagagattggcctgagaaggaaacagataaagcttagtactttctaactgtggggatgatcaacccatgtcagtgtcatcttgttcctcatcagtcctgatactaagacatgtccaaaagcaaaaacaaacaataaaaaaaaaaacactgggaagaagaacagtctacgtcagttactactgtctattgcaaattccagaaagcacaacaaaaaaccagcttaaacagattaaattttactcatcatacataacatggccaggcatatactattttctctagttctctcacttggcattctgcatagcagtggtctccaacatttgtggtactaggaactgattttgtagaatgcaatttttccgcagactgcagtggggtgggatcggatggtttcaggatgattcaagcacataagatttatcatgcactttatttctattattattacattgtaatatagaaagaaagaataatacaactcaccataatgtagcatcagtggaagccctgagcttgttttcctgcaactagatggttccatctggggatgatcagagacagtgacactggaagtgtgttgcttatgtccaatctacttcataatctccttttggttgctgtcactaaagaaaaccatgattcacatagataggatattggaaatggaagcagaattttcagtgatttttgtggcagtctcaggatattctacactgactttaattcagaacgtatggagatttgaagttgtctcaaacatacttttaaggccactgttatttgtgatttcaagcagttgctcttctcctacgacgaacaaagataattgacctggcttatttaaaaatgggtagcagatcaattccttcccagttcagaggccttttttgctgggaagtaatgctcaaactcttatgaaagctgagagtggtgatcatgtaccagctaagagaaagagcccctggctcagtctctttcaaaatggctgctgtttgaatcatgtcaaaaaccccaatgtcctgtcatagcccccataattccaatttggttttgaatgcaactatttttatctggcgacttgaacacagttgttgttccgccctgaagtgacataatgagttctttgagcaggtcaaacaagtaagcaagttttgcaacccattctgtgtcactgaaatgttctgccaattgtaactgtttttctaaaagaaatctctagagcacctctcaagactcaaaaactctgaccagtgatctacatttagaaaggcatctcactactatgtataagagaagatgtttgtgctctgtgtccatctcacagagctgtgcaaacagacatgagttaaggacatgtactttaatgtggttgacaactgaaaagcactgttaagttcaggtgaattgttttggctagccagcatttctctatggatgacacagtgcatagactcgcattcaaaagtgaccgctttgacctgagtattgaaatcagaaagctgtccagtcatggcagctgctccgtgtgtgggcacatactgacacaaaatgaccagttcagtttttctgagatgtaatcattaaaagacttgaatagttttgcaactgtggtgttggttggcaacaaaagtggttgtaacatatcctcatgcacatcctcctgaaaaatatatcccagaaaacaagcactgttgctttgtagttgacattagtagactcatcaacctggattgcatacgacggtaacacattaatcctaacaattgtgcccaatatcctctgctatttcatcaatttgtctagttatggtgctagccaaaagagaaacatgtgctgccctttgaactgcagcctctcctaaaagttcatgacaaatgtcctaagcatcaggcagggtcaattcttcatcttacaaaagagcttcttagctttagcaatgtggttagccacttacaataatgttctcaatgcagacacattcgatgaagtggtagccttcaataattggttcttttcatgttcacgttttttttttcttttgaaaaaacttcaaaggcttgtcttttaatgtggggtgctttgtctccacgtagtgaagcaattttgaaggtttcattacttcgttagataaccggtggccacatgttatacaaagcagacttggagaatgtgaatcacttgttacaatgaactcataatttaagtatgattcttggtattttcttttaaaggaagctttctttttgttttcagtcttagagtattctgctttctcatcactgggtctttcccccttttcataaaagctctccagtgaaattgttttttactcattttggctaggattagcttctgggcttaatcaaaactgtgactgagacaagtgtgcagtgtaggaaagagtcaagaatggaagtagtaaataaaataatgggtaggccacatgtggactaaaataagtgtcagattcggacttaaagcctgccatcagatacagctatacaaatgaagtacatcaactcacttgccactataaagcctgccaccagatgcagcttaattgtcgcttgcctctcaataagattttaatatgagactgcaagtaattgatttattatggtctatgtgcagtcaaacctctctgataatgttaatctgtatttgtagccactccccagtgctagcatcaccgtctcagatcatcaggcattagattttcataagaaacatgcaacctggatcccttgcatgggcttaaccaaaattcacaatagggttcgtgctcctacgagaatctaatgttgccactgatctaacaagaggcagagctcaggtggtaatgcaagcaatggggagcagctgtaaatacacatgaaatttcacttgctcctctgctgctcacctcctgctgtgtggccagttcctactcaccttctggcaggcagcccagtccttggcctggggttagggactcctacaatatagttctctcccccggcttcaaaataactgccacatctcaggtagcatgtccgtgcatcatgcagaaagaaggcaggagagaaagggtgagcaattttctcttaatttatctatgctttttgtttttaatttcaatgggcttttggggaacaggtagtgttttgttacatgagtaagttcttcagtgatgatttctgagattttggtgcacatatgacctgagcagtgtacactgttccaaatgtgtagtcttttatccctctcctctatccttcccctaaagtccccaaagtccattgtatcattcttatgcctttgcatccttgtagcttagctcccacttataagtgagaacatacaatgtttcatttaccattcctgagttacttcacttagaatgatggtcttcggatccatccaggttgctgcaaatgccattatttcattcctttttatggctgagtagtattccatggtgtgtgtgtgtgtgtgtgtgtgtgtgtgtgtgtgtgtattctttctttcttttctcattgattgatgggcatttaggctgattccatatttttgcaattgcaaattgtgctgctaggaaaatgcatgtgcaagtgtctttttcatacaaggacttcttttcctctaggtagatacccagtagtgggattgctggatcaaatagtagatctactttagttctttaaggagtctgaatactgttttccatagtagttgtactagtttatattccaactagcagtgtaaaagtgttccctttttaccacatccataccaacatctatatattttttggtttgttaattatggctattcttgcttttgaattgaggaaggaagggatggttgtgtaggtgaattgcatagctaattcacagtgcacagcacaggaattttcaaggacaaaaacaattttctgggaaaacttcagaaaatattttttcttttaagcactggatgctgacagagaatgactgggttaagtgttggatgtcaatgtctaatcagatgtgatgtttaatagtagaaaagagcatgaaaaagactgtcaatttctatctcattaaaaaaaccaaataatgggcactttaaaacataaaatatccaatggaaatcagatgtagaatgcctttaaaatccaaaagctaaagtcacttgactttcaaaggcagccataacattaaaaaaatgcctaaaatacaggccaagtgtgtgtgtgtgtgtgtgtgtgtgtgtgtgtgtgtgtccatgtttaacatctatatatgctaaattgaaacaaagatagataaataacaataaattattacattaataaatgggatttttaaagaaggtttagagatattcctttaaatgttacattacactatacatttttagacttaaatgacttgtacaggaaaatgtttatagtcagcctgatattcaaaagtaataataatttgctatattttttataaacaaaatacatactttaggataattttattggaaaaagaattttattaattttctttcctatgatactgccatatcttcttattttaatgtccattaatattaaaaattaactccttattttgtgacacccagaaaattactgcaatgaaaaataaaatacagcttgcattgcagcaaatgagtatctcattatgtccattggtagaccaattaataacaattttaaatgaataatgttattatctaatcatgagttttattacagaattcttttagaatagatacatgtcttctgggcttggttatgtgaagatagaagtatgcacatttattattgttgtaagtcttttaaaacaacatttttgtgatattagctatattaaacagttatacagaggatatcataatgacgctaagtttaaactaaactattgcaaataaatattattcacaacagctctaataattaactgtcagccccttataaacagtcataaattttcttttctatttaaggatttacttatcttacataaatagggtttacttgtcttacatatccatttaaaagttagaatatcaaagcgagtttcctggaagtcttatcatatgaataattgcatagtctcttaaatgttatgaatatccatctacaaatactgtagactatatagatcatgattttctctaagtatttttatggtaaaatagaaatgaaaaggaattctctgtcaaaatgaacataaaagcagttaattaaggagtaggtgataatgattcaccttataattctattttatattagatttcttcatatgattaattatcttctttatatgtaagtctatattctagaagctacaaagccatgttaatgtaaacataattaaaattttatttctataattcaacacaggcttcataaataattttgtaatgtgaagaaaattaatgccatgtaagttaataattacctaaatctgttcttcactagagctcttgagctaattttttcactaaacttcttctcccctctggcctctagaaaactaaggccaaattcctaacaacaacagaaactaaatcagtttcctttggatgaagaactccgttatccagtgcttttaatgatcagtgttgaggtttgctgcagagattctgtgctttggtcccatgttgagaacattctccttgtcacaatatttgtctttctgttctggtctcctattttagtcctgtagtcagctaagacttgcagactccagactcttaacctttacatgtaacatttattttctgggtgtttcttgctttgtttatttttctttcatttgtttttgttgttgaatcataattactactcacgtgacagacatagacttttcttcttacttatccagggttaatgttggattcaatgtgatatatcttcataatttacttgcccacctaaagaacatctttcacaaacatttctattaaaaaaacaattcttcgtctcttcctgtatgatcactgctgttctgtacgttcccattacttaaaacttagcagcaatttgcctttaaaaaaatttttttaactaggctttcctctaaatctagcacttcagataccttctttaccaggaagagagctcactcagagcactagtgctaactgctcagctgtcaatacagcccattcatgggaaccagctatattcatgctttcatcatgtcctgtgtatgtttcaacacaatctattcatttaataatgtgtgtatatgtgcatgtgtgtgcataaacacaccaactgtatgtcagaaactgttctggggaccagcagcacaaagataaaatgggaaaatctcttcttttgtggacttcacagcacagtgtgggtgagaaactcacaagcaggtaacaaatcaggttaaataatgagatagttcaagtctgaaaaggggatgtatacttagtagagtggtaaaagaagacccccttggaaaggtgcattagagcagctaactgagattagagaataagcattgttgatatctacagcaagaacattctgagtaaataaagaacaacttggcctggcatggtggctcgtgtgtgtaatcccagcacttagggaggctgaggtgagcagattccttgagctcaggagtttgagaccagcctaagcgacatggtaaaatctcatctctatgaaaaaataaaataaaataacaccaccaacaacaaaaaacaaatataaaataaaaaattaggtgagcatggtggtgcacaacaatagtcccagctactgggcaggctgaggtgagaggattgcttgagctctgtaggttgaggctacagtgagctacaatcatgccactgcactccagacctagtgacagagcaagaccctatcactaaaaataaattaataaatacaatttaaacataaagtatttttatgggaggatcagttttcatatcaattagaaaaactcagggtaccaatggctcaaaacaaaacagaacccagaaactctcagtagctcaaagcagtacagtgtattttttgctcacatcacatgcccattgtgggttagcacagggtgttactcgttgttatggctttggaactcaggctaccaaagctttatcccaacactggcttccaccatcacagaagctgagaaaaaagtaaatgggaattcctacactgatcgataaagcaccttttgatcacttggggtgacatttcattgcttattccacagagcagttttgagtgcaggactggacacaacatagtcaatagaggtgaataataatagtttaatgcttatgtgttcagaagttaaacatgtcattacagcttgtcacatatttatgctaacctaacaaagtccgaatgtaatttacaaatgggaaggatataaagaaaatcataaagccataaactcataaagccaaggtggaaggaacaattttgagttttattcaccaggaaagaaaatgcaatattgcgaattgtaacttacatcaatagatcaacataacaaacttttcaatcatgtaatttatattttacctttgtcagtcccttatttgtttatataaaattagttttaatatgtaaggcatttttcaattttctcataattgcaactttcaggcaaagttgtgtttacatcagcagctatggaattgctatacgttgaagagaactaagtgtttttcagcaagctattggatttgtgtacgggagctcagattttattttaaaagatgatgtggtctttttttccagtttgtaatagaatttcattaagctacttttattgttgtttctttttgcttctatataattcccttcagtctcaataagccttacctatgagtgtgcttgagagagcaggtggtgtttcaagagagactggggctgggtttgctaatcatgagaaaagagatggatttagatatttcatttttcttctctgatgcaatccattttaatagaaagacatgattttataaagctgagtttgggttgtatttatataaacacacctgtcacaattagccacatacataatttccctgttttgtattattcagaaaaatactacatgtagttaattctgctttaaatttttttaaaaagaaaaaaatactattattatcctgctaagagatgaactgaaagtagatgcacagtgtatttgacagtctctgctctagaaaaatcagttttaatgcaaaaaagcatgatctccctctgacatttggaaaaaaactggttattcaatctggttactaataaaatgtgtgtttctttcatttgtattaggcttatcagtataaataaaataaaagctacatggttaaatgtgatttcaaattgtgataactaagactatatatacatatatttgtgttggtatgtgaacatatgtatatgttcaccatatatatgtgaacatacacatatattcatacatatgtatatgttcaccatataagtatgtgaacatatacatatattcacgtattcctctcaaacttacctggaacattcacaaagacagaccagataatgagtcacaaaatacaccttaacaaatttaatagaagagaaattacataaagtttgccttcaggcaacaatagaatttgaaaataaattaattatggaaagagacctagataattccaaaacatttgaagattaaacgtccacttggaaataacacatagatcaaagaagaggtctcaaaataaatttcaaaaactttgaactaaatacaaataagaatacaatttatcaaaatgtataagattcagtgaaaacagtgcagacacagaaactgatagccttgaatgtgtatattagaaaggaagaaagttataaaattaataatccaagcttccacctcagaaaatgagaagaaaaaaaaagcaatgaaagcctaaagaaaacaaaaaaatgaaatatttagaattagaggagaaaatattaaaattataaacagaaaatcaatagaaaaaaatccttaaaaactggctcttggaaaagatcaataaaattgataaccatcttgccatgttaaccaagaacaaaagagaaaagagaaaaattgctaatatatcaaataaaaaaggtttgttaccaatggacgcagactgccaaaactcacacaaatagaaaaataaaatctaaattggcctctatatcctatagaatttgaaccaataattaataacattccaaatagaaaataataggttcagactgtttcgctggtaaattctaccaaatactaaggaagaattgataacaattctctaccacgtttttcagaaaatacaatccgagggaacacatcttaactctttgtcagttagcttgagctgttacaacaaaatacctgagattgggcaactcaaacaacagacatttatttcctacagttgtgaaggctgggtagtctgagattagggtgccagcacggtcaggttcgggtgaagacctgattattgccgagaagatggctgccttcttactttatcctcacaaaataaagagtggtagctttggtgtctctttcccttcttataatggcactaattaacctcatctaaacctaattacctcccaaagcgccacctcataatttcatcacaatgcaagttaaggcttcaatatatgaattttgagggaaacaaacattcagcgtaacactctttctacaaagccaccgtcaccctactaccaaaccaggtaatgtcattgtaataaaggaaaactacagaccagtatttttcataagcgtacatatgaaaatcgtcaacaaaacattagcagaccaaattcagcagtatatagaaaagaactatacaccaagacctagtgggatttgtttcatgtatctggttcaacatttaaaaatccattaatgtaatccattatatccagcaggatacagaataaaaattatatgatcatatatagatgtagaaaaagcatttgactaaatttaacattcatggtaaaaactgcaaattcaaaatagaggaaaactttatcaacatggtaaagaacatctacaaaaaaaaatacaactaaacaaaaaataagaaagaagaaacaaaatgctttccccccaagaaagagaacaaaagaaggatgtccccctcacatctcctcttcaacaaagtgctggaagttgtagctaatgaaccaaggcaataataaagttaaaaaaatagaagtatacagaatagaagggaaaaaataaatctttgttgatggaagacaggattgttgatgtagaaaatctcaaaaaaaatcaaaaaattttcttggaagaaaaaagcttttttcataacttctgaaagcagaagcaaccaagatgtccttcaataggtgaatggacaaacaaaatttcatatctgtacaatggagtacagtattattcatcaataataagcaatgaactatgaagccattgaaagacatggaggaatcttactgagcgaaataaaccagtctgaaaagttactgtattattccaactacatgccattctggaaaaggcgaaaaatagagttggtagaaagattaatccattctaggggattgagggggaagagaggagggaattgataggcgattgacaggggatttttagattgacagaatattctgtaagatactgaaatggtgaatacatgacaatacacattgatcaaaacccatagaatgtacaacataaagaggcaatcttatataaactatggactttagttaatattgtatcaatgttacttcattcattatagcaaatgtaatgcaagatgtcagagataaggcaagacaaattcagggaagggacatgtatgggaactctctgtaatttccattcacctgtttactcgtttttttttttttttttttttttggcaaatctgaaacagttccaaaaaataaagtctaacaaatattctaggtcagtgttttgctaaaaaaaaaaaaaaaaaagagaatagtctgagctccattttctttcttttctacatttattgattgattgctttaataattctatgaaaaatattttcttacattattataagaaggtcattggatatttaaaggagaagggagaaacacatctgtgagttgatggtagattttcaaaaatatatattgattaatttataatttgtattatagaaccctaaggatagagactgaaatgttaaatagttctacaaagttcataaagaaaaagtgttctcctgacccatgacttcacacttctgatttttactcctcattgaccacatatttcgtcttgttccagcctatttaattatctgtattagatttctgtattgagatttctcagttgaagatttagctctactatacaataacttacctttcaatgatcactctttcttgcccatcctcccagtataattatttcactttttggttatatcaatattcagaacttctcttatgtgacaatgtcaataatttctgaaattaaagtctctagtgcaatatgaactttttttttattttgtgttgtagttaataactactttctttttttaaatttattattctatgtttttatcacaaatttgtctcagtgctccaccagaaatctgaatcacctctcaatttgtgttgttatgtttttaaaaaacagcacaaattaaccatgtcgttttctttctcgaggtatacttcctataaccttccatccagtctagattgtttgctttgtagtcaggacatgtaagggtcatcctgagatttctttttcatctttgccattattctaaagactttctctgccttctttttggttagacaccttgtttcctggagtccatgtgttcttctggtttatttatgtatttatttttcattctcattttgattaaagcctaccctctttttcggtagcttctttagaacagttttttctttatacagtttaaatatctgaatatgttcttgcaactttgtatttatttgagtttggctagatttaaattgatgctctggtaactgtttcattcagaatttttgaaggctgtgctcccttgtgtctaccttttggtcttgctattaagtctgatcctattgtcatttttaattctttgtttataaccaatttttggtttgtttgtttttgtttgaaagcttttatagtcttggtcatctctttatcttggatgttaataatgtttacaaaaatatacttttatattttatagttctaagcactatatgggttctttaaagttggcgactaatgtgtttcctgctaatttatattatcccttctgttttctcaattctttctacctgttttaatctgttgtaccactttaatttattcataattattaagccaaaaatattttctagccaattttacacctttttgctattttattctatttcctgggctattccctctatttttatcttccaatcctttgttatcatattttaaattcccaaggctcttttctgggtctctgaatgttccctgcactcacctcatgatgcaataactttacattcttcaaagtttatttatcatgaagcatggtatttgaggtttcattttgttggctactcgcagaggataacacagagcgaggaattcttttttttcctttgaagcatattgataaattttcaaagaaaattaattgttttcatagatagataggtgcctatttccttattctaccagatacacaagtgttaatggcacaaaatcatttccacaggtagaactgagaatgtgggggtggatgtctggtgaaagttcaaacaaatagcattgatatacttttctttcaagtattgttgaagccagacatttaagagtccagcctcacagtttctctcaatctctggccatacctaagtcctctagggattttaaacaatattttgaaagtaaattccctgaaaagactaatattactactagtccatgtgaaggggagtgtccccaaaaacaattggaatttgaagtatttatttattcatgcattcactctcttatcaataattgattatctactatgtgtgagaaacaatgctatgcatttaggatacaattatttaattcaaatatcattaatctctgtgtttttaaggctttgttttccttgattgaatttttaactggctggctctttcaattgggaattgtagaaaacatttttttttaaataataagatcttaaaactcttacgttattcaatactgtaataattcttagaaagtaaactgcgttcaacctggaaagatcacctatatggtaaataaagttgttgctggtgttattgttttagacttgaacaatttctggaactagcagagaaaatttttaagaaatctgaagtcaggaactgatttactggtattagagccatagaaaggataatacagccactttgcccaaggtatgcctgccttacttttttatttatgagtcactagcactgctagaaaacaaacagctgcatcagtattttcctggatattaaagtcacttttattgatgcctttgaacttgctgtatcatctcatagggacactgcaaacaaagccctagtaaatatacaatttattaccagggaacctagttaatgaaaatctgtgctgtgtataagaaaagctacaatagtctgtttggaaaacattcaaattctatttccaattacgtgtcattgtgaggtttcctgggttttgctctttatctttctcttttaaaatctcaatgtgttgattattgatctctcttctacaaagagacagctataaatgtgaacaagcagtatatatttggaatattatgaatgtgtatcaaaatgcacctccaagacgcatacagtctccgtaaaacaaggtttacttattttgtgagttaagcgaactaaataaaatgtcatgtttaggttactaactcaaaattaggagttattttgatccttagtatattatcagaaaaatcttagtacactgagtgaaaaaaaatttatgccattattaaacactcaaaaactattttctcatgcaatgtgaacattttaaactcttactggctctcatcaaaaattggaagaaaatatcccagaggatttaattcattcataaatgttttcctgtttttttttctataatttggccaatgtatatctctgaaaaaacatgcccaattaagtccaatattctatttcaaaatatgacataaatctttctctttaatgaaacaggtagttttctattgaggtggtccagattgcaagaagactaaaatgatatattttttaaaaaggaagtgaacatagtattctaatttcatttcaagaggaaaacaaaaattatacatatgactataaaatagtattgaactccagtataaaagtgaggtatgagttactattttcctctttcttaaaataatagcaagaataaaaatataagaacacaaataaacaaaaaaggacgacatttctagtaaaactaggagaaaggtaaaatttacacactcccaaatacatgtacatcttttcaaagttgagtttgaacatgagctgtgtgagagggcatgaaaagggccaggagaatacctcaaaaatccccaacaaaaattcacgtgctacagatgagagtcttatttgatgtagaaaccgaataacttgttctttaccctgctccagctggattcagagaaatcttgccaacatggctgtgtaaagaatcatccaggccagacgtggtggctcatgcctataaagcactttgggaggccgaggcaggtggatcacttgatgtcaggagttcgagaccagtctgaccaatgtggtgaaactctgtctccactaaaaaaaaaaaaaaaaaaaaaaaaagccaggtgtggaggtgcgtgactgtagtcccagctacttaagagactgaggcaggagaatcgcttgaacctgggaaggggagtctgcagtgagccaagatttggccactgcactacggcctgggtgacagagtgatacctcttctcaaaacaaacaaataaacgaacagaaaagaatcacccatatggcctctgagactacataaaaaggggaagaaagtcagcttcccagctcaccccaggaaacctgcaagttgtcacaccaggaaactgcaatttattatgattagtaatacagagaaactaaaaaccattgataaaatgctattttaaatatagatgataaacaaacagaatcagaacttacagaaagatgattaacactgacagaaaatatagaaatattgatacagaaaaaaaatgatgatgaaatattttgcaatagatttttttaatggaacttttacccattaaaatattagcaggagagagagagagtaggaaagagagaaagagagaacgagaataaggagatgacatatatgagctaccagttcttagaaaggggtggaagtagaatgatcacacttaatgacaaaatgaaatagtgcaggaaaaaaaaaagatgaggcaggaaaaaaaaaacagaaacaaagagaatagatactgaaaaataaattaaaatggcagcctagaggtaaaaataaatgcaggtatgtagagtatacctcaatgaagtccttatgaaggaagagaaggaaggaagaccacaaagagacagagcccgttgatttcagtccgggcagccactgcacctgaagctacactgctgatcaacaacaacaacaaaaaacccagtagaaataattgtatttcggcaaaggcacttgagagtgttttatggtcgcaaaatagaaggtacatcagcacccagaatgaaagtcaactgtgattccacaggaaaaaaaagaaaaaaaatctgaaatgcatcagttcttgggataaatggaaatgaaacagttgaaagtgcctgttctggagatgattcataaagatccaagtgaagattccaatattcatcaaagcaccaagaaatcagtgtgaaaaagaacatctcaactgcaggatcagtacacgaactatcattatataatggtatagatattttaaaaatacgtgaagatacagtctacatataggcagagagaaaagtagttttaaaatgcaaaactgaagttttgttgctgttttaaaattctaaaagtccctaccatatatatttagattttctccatttacaatgtctactggattctattattactaaatttaataaatatataaatcttcaacatacaagaatataattttgaggaatactgtgaaatttggtttctctagaaattactatgcgtgtcctaaaattattaagtggacttagaatgaatactgcgtcgctaaaactacaatataaagcaatgatttcaatccatttatcacctacctcatttcctatgctttagatttcagaagtattacatctatatactataaacatctcacaaaacattaataagttttgtttaaataatgatacatatttttaaatgtattaagaggaaaaattgtgggatttttaaacttttattttaagttcaccagtatatatgtaggtttgttacataggtgaacttgtgtcatgggggtttgttgtacaaattatttcattactcaggtattcaccctagtactcattggttattttccctgatcctctccctcctctgttcctccaaaaggccccagtgtgtgttgttcccctctttgtgtccatgcgttctcaccatttagctctctcttataggtgaaaacatgtggtatttggttttctgttcttgtgttagtttatgtaaggataatggcctatagctccatccatgtcccctcaaaggacatgattttgtttttcttttattcgtgcatagtattccatagtgtatgtgcaccacattttctttatccagtctatcactgatgagaagttaggttgattccatgtctttactattgtgaatattgccacaatgaacatacctacatatgcatctttatagtataaagatttatattcctttgggtatataaccaataatggcattgctggtcaaatggtatttctgtctttaggtctttgaggaattgccacctgtcttccacctgggataattatgttttatatttacctaaagatttgtcatttctgatgctcttctttttttcctgagggtcaaagtttctatatggtattcatttcccttaatctcaaataattgcctttaactttttttttgaaatgttattctttcagcaacaattttattcattttctttgaccaaaaatatctttatttttgcctatattatagactattttctttggatatagattcctaagttcagagttattttctttcatcaatttagatatgctgtttcatggtcttttgccctctgttttttgtgataaactggatttcattcacgaccttcaaatgtatgctttcaataatttaattatgctgaggctggaactgctttcgcttgcaaatatcctgcttgggggggtcactgggtttactgactttctaaaatatttgccttttattaaatctgggaaacttttggctattttttcaaacatgtattttttcttttcaattctttctctaattctgaaatctcaagtttaaaaatatattaacctatttgatccagagtttgctgactctatgtttttctattttttctgttttttagatcagatgatttatattgacttatcgtttagtttagtgaatccttcctctgtcttctccattctgctttatttcagatgcttcattttttaaatcctgtgtttccttttgcttcctttttaagtatgtattaatatttctctctggtgaagtatcttatcttttcattgaatgtgagtgtgtttttctttattgataatatgatattagctgccttaatatctttgcttgctaatattaataacgggatcatttttctttgtggttcttgcttgattttgtttcctctaaagactggattacgtttcactgatttttttatattcaatgttgattaactctaaattttagcttgaatatagagaacttgcattatgctatattcctttgaagaattccatttctttgttttagtgggcacttagcttggttggacaaaaaccagcaaactcagtgtcttggaaacatgtctcaattcaattattttatcttcaactgggttgaactgaatctgcctcacacatgcttgggtcagtattagcatatcagacaggtttttggagacattttaaaaagagatttagaaacttgtcaactcacagtatctcctttctgtgaatccccttatttccagctgttgtggttgcttcaaactgtcctctagctcttaaatctggcaagaatgcaggttttctatcagttttagcctctaggtacaggaaatgactgtggctctcaggtgaatagttgtagaaacataaaaaaaacttttcttgttagttcctgcttcaaagtattgactgccctccaaattttacttacatttgctcatgatccagggtcttcaggtgttaactaaaaattgtctagagtttctggctattgtctgaaggaggaataatctttagtaggaaattactgacctctacggtaagcaaaatgtcaagacaaacaggcataaacatagaaaaactgagaatatttcattgccatgattcttttttaagtaagtactataaggacaagatatagcttggatatgactgggaaaactatgacaaaatgattcttatcaatactgacaatatttagctgcaaagcttgtttaactgtacataaaattgaataaaatgttgtgtgccttaactttagtaactttacttacagtttgatgaggtaagagaagaaatggaggaggatatagatttaagtttgctgaatgtccaatccctgagaacagaattaaatggagtaataaaaatacaggtatatttcacattgtaaaggtaaacatgcaaggcctaatattagtaactaaaattgtcagcagaagagtagaaggggggttatagatgagaaaacatgttactgttttattgcttatagtgattgatacatgtaatataaataaatgtcaaactgaggaaatacacttgtagtgtcaaataactaaataattaattatgtatctatatctatttatttatcaatgtctatctatgtattgtaagagttttgtgtggtatattcatatgtattataatacacaaaaaagtagaagtagtatggaaaatattttctcattacagtgcatgtaattagaaatttataacaaaatacaaatttaaaacacctttgtcaacagaaatttcaaaatgttttctaagcaattctgtggtctgaaaggcaatattaattgagatttcagacttttagaacatatcaaaaataaacacagtacatagaggatacagcttaaattaacaaaatttaatacttctattgataatcaaataacaatgaaaacaaataacagcctattgaaaaagttagaaaaataacatcaagataataaaaaaataagcagaagagaaaacaatcaaacacacaaatcaaagtgctaaaaaaagtacccaaaaaaacaggtttgaaacaaacaaacaaaactggggaagatttgcaatttgaaccagaaagatctgctatctattaaacacagaaatcatacagaaattgattagtaaaacattacccaataaatatgggtaaaggtgataaatgtacagatcacagaaaggggcacataaatggggtttaagcctataaaaatatttagtttactcataagataaagaaaaattaaggttccattaagatactatttttgtctatcatactagctctagttatcaatggagaacattggaatttagggaggtatttttatcgggcttcagatatttagaagatagggaacattgatgtacagtccctgtagtaaatggcatggattcacaaaaagaaaaaaaataagctggtgtcccacagaatttccaaatatcttgccaggcattcatgtattaaaacgagtttatgattttatgagcctagaacctctattaggtttatatatttccacaaaatgcacggagaatggaattcaaattatattcagcatcttagtaacataactttaccttacgaataaatagaagtgttgaattttttctgcaacattatcaagagctgtccacaatttgcaatgtaacatcaaccatacaaacgccacaggaggtatctgagtaaccaaaacgacttgtctttgcaggacataaattctactttgtatacacagcagatgacataattataatttcttatataggcacatctctgtacttacatatcaaaacacaaagattgttaaaagtttattttattttccttttttactcgagttataacatcgtattaatttttttttgagacaagttcttgctccgtttcccaggctgttgtacagtggcttgatcacgactcactgaagcctctatctcccatggtcaagcaatcctcccacctcagcctccctagtagttgggactacaggtgtgctaccacacccagttgattttttttttttaatttttagtagagacaaggtttctctgtgttgcacaggcttgtcttgaactcctgagctcaagcaatcctacctgccttggcctcctgggattacaggcatgagccaccatgtccagctgaacactgaattaattttttttgaaattacatagacatacaaagacaaagtgaatttcactacagcatagtacagagaagcatgacaattacaatttatatatatatgtgtatgtgtacatgtgaagcactgtacttaatatgatagagaataactgatacatccaaatgaccacaaagaaaatgttaaataatacacttattttgcaagcctctagggaaacaagcactttaatatattaaaggtgggtgtgcaacttggtacaattcttaggattgaaaatatctgtagatgtttggaaatatctgtaacattttctaatgtatgtaccttttcatatctgagaactcacttgaaagatgtaattgcatgcatgaaatgacattagtacaaaattattcattgtagcattgcttgtattaacaagagattgggaacaactatgttgtcaatgcttgggttctggttatatacataaattcaaatttacacaaaaagatacagtaaaacacaataaaatacaatgaggaagccatttctgttttgatatagagaggtctcaaatattttattgagtgatataagcagaataatgtacagagttgtgtattttattgaggaaaggaggacaactgagaatatatgcttgtattttactacatatacctttaaagaaatctggaagaaaacagaaatcctaagacacagtgttctcttgggtgtgttatgatgggagagttgccgatgttgagaaaatgtgctgttttgcacagaaatgagtggctgacttttcagtgcatgcttttttattttaattacttaagtagttggatgtaagaatagtaaaattaaatgaaaattgaggtaaaatataattaagatctctgcatataatttatgtcttgaaacctttgattataaagtgtttcctagaccctttcacagaaaaatctccatatagctattaataagaggaaaatccattagcacacgaataacagattgtgaataaaaagctgaacaaatactcatctccattgctgaattcatactgtgcagtgttgcataccttaatccttgtcgctttattacaatgacaaaaaaagttgcacgcaaacagtgaaataaaatgtcaagatatttctgcctggaaggagaaatcatgcaaagattgtctatttgtgttctttaagaaaacatcaccaggacagaaaaagaaagaaatccaagctttctcagtaggacaaagtttgaggaatctggcttaaaaagtctattctctccggctgtcatctcaacaacaaaaaatacccattctacacttaagttgaatttttcttgcttgctttcagcaaagatagagtcatttttaataaaaggtttttattttagttttagctaattatttgtgatgccttcttcatacactgtatcctattccagcagaaaatctacttggatttatagctgaaaaaattgtgatacacacattacctttgatcattatttttcataatgatagtcagcactaaaattcctacattatagaagcttagaggaacaattcagtcagcaaagggatgagtgtgtaggagatgattttgaatcagtagttacttagaaaaaaactacttttacttagattgttcatttgagatggctagaaagaggcagataaaatacatggtgtttacaaagtatcgtagtaactcaatgaaagtctttgaatgcattaataaagatggaaatattgtaaataagagtaacatgaaatttgacaactatcaaatgtccgtttgaggtagtgactcatgtatagctgtataatatgaacctcctttactgcatatagctgaaaataagtagtaggaaaaataattttttttcatttttaatggtttatttcttcttgaatataaggatatgtgagctccatcaacaaaaatgcagtgactaacagaagacaaaggtagataaatgaaatagatttgacttgtcatttgttttcatagattcagatttcctgtgtgttccctttatttgaaaagttttagtagtgttgtcacacttctcttaggttttaaaaattagtttgaaatttaaataaacataagtctaatgctttgaagcaatagaaatgattatttggtttgtaattaatgcagttgtttaccattactttttataatattttacttaatgtaaggaatatgatgcttattaaacatgaactatgtatcagagttagcatgtatattatttatttaatcttgaaaggtaaatatacattcacccacacagaatgaataggggaaattgcaaatgtattgtatgatttgcccatactctgtgaatcaaaactcgttcacactcttaagcttagtgtctatggaatatagtgacctattgtgtaaatgatgtcaccctttcttttattgttttatcatttaatgttttatttacttttatgagatttttcacgactggaagagtgccttaaatatatttttcaattattttatttaaaataatacctttaatagagctgtcatacttttaatggtttgtcaaatcaatcagtaacaatctgtccaaaagcattctgcttgtctatcccaattattaccagtgtgtccagtgagcaggtgaaatgtataatctgagaaacttaaatgaaaaaacagtaatagttctattttattctcaaataagcaaatccaaattactctttttgtatgttttccaactattcaatttggagtatgcaattatatttgttttactggcaaagagacaatagcaatgtaacacatctcaaataggatatctgatgaatttattggtaaaacaaaacattagttcataagtgtatttggagggtcgagctatttccaaaagtctaaacaatcaaaaaggtaaccagagtactcttttactattgctttccaatgtttctccaaagaattggaattatatttatttagagttcaatctaataccaaaaaaattaagaaaaaagttataatagtctagttgtaggttaaatcattattttttaacataattaaacattcaaaactaataaagcattatttaaatattagcaatctgaatcatttcactgactattctagataactatgtaatgtgtttggtttcgtgaaatgtttatataaatgaataatttataaaaggtataattaatataaataacaatacaatacacactcaaatattcactatcttaagtgttgtattcccagtatctcagaaactccttgtagaacacttttcatttgtagctgctgttctcattccatgaatgaaagcctgtttatattagaaatttttgtttagaaataatatttatagtttagtaattttgaaatttatatttaaatacagtcatgttgtgtgcaatgttttgtgatttggctgctttttccaacattggttttgtgacgtttcttcaggttgatttctgtaactacagttttttcttttttttctgcattttatgttcggtctactcttgacactcatttaaggggtgtgaacgggttttttgtttggtttgtcacctcttttgtttttaaccccaactatttctaagaaaagctcctttgtacataactcctagattatatacacaggagtttgtttagaattggagttgctgggctgcatatatttaactttagtggatgaactgggctaaaatagatacctctccgtatttattgatgtcagaatcttggctactggttcagtggagaacctcagtcattgtctcatctccaaaatcattgtgctcaacttggtagttgtcactttagctagaggttttgggactaatccagccagatcacacaaggcctgaagggcctttctactcctctgaagtgctccacattttgtacagactgagatgccttttgatcaagaaaagacaggagacggggcttaaaagaacacatttctcacgctctgtctctcttaatagtcttttcttcagtgtagtgggttcataaaacttctccagagaaaatttacttcactgagcaaacagcagtatttcctgggaggtttcagtgccgctctacattactttactctcttccttcctcgcttccctatttccttcactctttattgagctaagactttaagtacaccaaactccctctaaaataaaatgctccactttcacatgaaccggcagtgagcaacagatcgattcctccattacctccttcacactctccataatctaatttctagttttctaccaacatcaaggacttaaaaatggcacttaattttaatttcagattgcatttttctgggtattaccagtgtcgaaagtttatagactattcctgtctcttccatgggatctcagttcatgatgcttgcatttctttctttctggttgtttgtctttttcttttgttttttaatttctatgtttttttcatatttatataatgtagatattaatgtttcatcagttatttgattaatatagctcatcctgatttactatttgtacagtcagccctttaaatccctgggttctgcatccatgaattcaatcaattgcagattcaaaatattcaaataaaattttgcaaaatttcagaaagtaaaactggaatttgtcagacactgagtcctgtgctgagctcatgtaaatgaaatgatatgtaggcattgtattatttattacaagttgacctagggatgatttaaagtatacgggagaatgtgtagtaggctacatgtaagtactattgccatttcatataagggacttgagcacccacggattgtggtgtctgcagggggagagggagagtgggccctggaaaaaagaaatctcccatagatatagaggggggatgactgtatttttactttttatgacatatgctaaaacagaaatttgtaactttaatgttgatagatttatcaatgtatttctttatattttatatgcttgtttcttttgagaaatcacctgccgtttcaaaattgtggattacttcttattgtcctctaaagttttataatgtacctttcacatgtaagtatttagtccaactggagttgattttctgcttgtggcttaaggtggagctagaagccttgcatcctttattataaagttgatattatacccacctattgtcaatgtccactctgatataaatcaagttaagattatgtttatttattctatattccatacagcagcctgatgttctaattttgttcccaaactccactgtcttatttaataatgctatatataaaacgaggtgtaatatcttttaagtacagtcctaccacatcatttttctttctctattttactgcctggaggttcagaagccttcttgaaatgatgaacatagctgaagagagtgtgaccctaatgtcagtgagctgctgagtgactgtcaccatatgcttatctcaagatttctcagtaaaccatgagaaaaggaattctgttttaaagccagtgttatttgaaacgtctgttacatgctgccaaatgtatccttaattgacaaaaccattctgggagaataatttctagattctgaaaggtgctttttactcagggctaatgcccagccacaacacacatttcaactagtgacttaaacctagtggacattaaaagtttcagagtcaatgtcccctgtggtttgttgaactttttcattgtcactcacattttctctattgcacagttttctacagaatcactcaagatctagatgttccatattcttcctaagtactttttccatatcgagcctctcctgagaaaatctcagagaataaatctatgaaatggcagtttgccatgttaatttcaaaaacaaaaaatgtctccaaagattttgtgatactttaagcaaaaaaatcacagatttgagatttaaaaatagataaaaaatatgccttatagagaataatgaacagatcttacacttataaaagatgtatttgggtagttaggacatatcgaagggtgtccagaacaatgatgagtagctgtataatctcacttaaattagtcacataatttcctgggagtccaggatagcttcttcctaaatgagaaagttttactcaggtctcggtggttcttatttctttcattgtccagttgatactgttacattctttgaaaatgaatgtcacagattgtttgtttcggcacaaatgctgacctaccactttcctgcaccttgtattgtaccactctgtagcaaacatttggccagtattataaattatagagccagaaagtagaatagtggttgccagaggctgaactgggggcagtgggaatgcaggattattatttagccagtgtagaatttgagttttacaatataaagagttctggaggtggatgatggttgtacaactttataaatttatttaatgccatcaactatacacttaacatggtgaagattgtaaattttatgatatgtgtattttattgcaataaaaaaggggcaacaagaattaactggtctttcttaatgttcccaagactgtcatcagacaattccagcattaaatgcttcataccggccgggcgtgatggcccaggcctgtaaccccagcactttgggaggcagaggtgggcagatcatgaggtcaagagatcgagaccagcctggccaacatggtgaaacctcgtctctactaaaaatacaaaaaattagctgggcatggtggcacacgcttgtagtcccagctacatgggaggctaaggcaggagaaacacttgaacccaggaggcggaggttgcagtgagccaagatagcgccactgtactccagcctgggtgacagagtgagactccgttttgttttgttttgttttgttttgttttaaaaaaagacttcataccttgagtgcaagcccactgcatataggagctaacttgaaatgtcatgttcaaaagtagtttataaaacacttagagatactagttatctttcccttaaaatagcaagctggggcacaggccagcacaaactgttttgtcttttaagggcctccattagaagaaactaaacacacatgttcttcaaaatagttaattctctaaaagtatcagtcaggaaacacctataatatgcgcagtgtcttctcctatgcatggtttaggttgcaattttccctctaacccaggtttctcatttattccattactaatttttcctatattttctaagaaattctggtttgctaatggctccttttctagaaattaacactgtggtagatctatttttgtttatatcattgctatcattttaatgtgagattatgagaaaagagtgacatttcaaaaaaaaaggaacaaaaagtatagaaacattaatgtacagtttaaaacactgggatagtaaacgatgaccattaacttatttgtctttgtaaaaataaaagaaaaaaagtactagaattgtaaacacagtagtggggaagtaaaatgtgtttggaaagaaagaggaaaaaattcagtgccttattgaaatagagaaaattttatatttatttgaagagtgctctctctctctcactcatatagtaggtaggaataaaataaatacttaaggttacttatatattgaggaaaatattatgagagttaatgagctatttaatgacagattgtcacaatcttttctcaataaactaggaaatgacctcagcttaatgagagtgaagattttggcatgagaagaaatgagagtttaagcaggacaatgagagactaatcaaaatatcaatgacccacaacaaaaatcaaatttaaattggagatcatgaatctgtaatttataaagtttttatgtctcttcctatttttccaacaatgttttgttcctctggagagagaggcgatgagaagagagagaatgcggctagtgagatataagttaattaattcattccacattttatttcattcaacaattatttaatacttacgataagctaggcatgtttaaaccaaagcaaatgagaagcattctctgtcagcaatgaattttcagtctatcaggcaacggttatttaaagagggtgatagtatattttgtcaaatgtttttaaatagttatttaaatgcaggattaaattattgattaatttgtagagaaaatacatttttgtttttaaaaatgtgtatcaagctgtgatatggtttggctctgtgtccccacccaaatctcatctccaattgtaatccccatatgtcaagggaaggatctggtgggaggtaattgaatcatgggggcagatttcccccttgctgttctcctgataatgattgctcacaaaatctggttgtttgataagtgtctggcacttccccatgctcactctctctcacctgccgccatgtgagacctgaattgcttcccattcaccttccaccatgattgtataactgtaagtcaattaaatctcctttctttataaattaccaagtctcaggtagtgtctttatagcagtgtaaaagcaggctctagtgaaataatttgagcattttcaattgtcaatggtaatgttatttcattggagttttcacaaatcagtaggaaaaataaactgcccaagatacatggattgagtatcatgttcgtaatttccatgcaatggacacaggccagtccctgtgcagatctctgagaattatgtttttatagagaaatgttctaaagaaaatatatctggtacaatgtttaaaaataatctctaaaagatcattttctagatgaaaataagttgaaatatataaattacttcagttcaatgcttttattgcctttcctctgatgaggagatgtaacacattaagaaaaaaaatcttatgtggttttcgtcccaggttcctgacacagagctgctaaaattcttgaggtttcctgagtaatgagggtgacaggaacaccttacacagagctcctaaatccccttgatgtggtttggatctgtgtccccaccggaatctcatgttgaattgtaatctccaacattggaagtgggatctggggaaggtgattggatcatagaggcaaattagctgggtgtggtggcgggtgcctgtagtcccagctacttgggaggctgaggcaggagaatggcatgaacccaggaggcagagcttgcagtgagctgagatccgccactgcactccagcctgggcattacttttaatgaaggtgattttctctggtggtatgttttaatttcgtggtttttattttttgtgtatctgttgcatgtttttggatttgaggttaccatgaagcttgcaaatacctgacattgttgatgataacgctgtttgcataaacaaactaacaatcaagcaaagagaaaacattaaaaactctatactttttatcttttggtgtttctacttttattgtactgtctatgttttgaaaaattgctgtaattattgtttttcattagttcatcttttagtctttctactcaagatatgagtagtttacatactacaattactattttataacattctgtgtttttctgtgttctcactattacctgtgagttttctatcttcaaacaatttctcattgcttgttaatgtccttattctttcagattgaaggactccctttagcttgccttgtagtacaggtctagcattgatgaaatccctcagcttttgtttgtccagaaaagtttttatttctccttaatgcttgaaggatactttcactggatataccattctagaattaaaggatttttttgtcagcacttcaaatatgtctgccactgtctcctgggctgtcagctttccactgagaattctgctgccagaaatattggagttcctctgtatgttatttgtttcttttctcctgctgcttagaattctttctttatccttgacctttgggagtttgattactaaatgtcttgaggtaatcttatttcggttaaatatgtttggcattctataaatgtcttttgttgaaatgttgatatctttctctatgtttaggaagttctctgttcttatcccatttctactttctatcctgatcaatctgtctacctcctctttaagattagtaactctcagatttgccctattgaggctgttttctagatcttgcaggtgtgcatcattctgttttcttttgtttcctctgtgtactttcaaacagactgtcttcaagctcactaactaattatttcttgtgcttgatcaattctgctgttaagagactctgatgcattgtttagtatgtcaattgcatttttcagctcctggatttttgtttgtttttttttttttataatttcaatctctttgtgaaatgtatctgatggaattctgaatttcttcccagtgttatcttgaatttctttgagcttcctcaaaacaactattttgaattatctgtataaaagggcatctatttctttctctcttggattgtttactggtgccttatttagttcgtttggtgagatcatgttgtcatggatgaccttgatgcttgtgaatgtttgtcagcattgaagagttagatatttgtgggccttgaagagttaggtatttattataatttttgcagtctgggcttattttacctgttctttctagaaaggctttccacatattcgaaggggcttgattattgtgatctacatctttggtcactgcagccgtatctgcattagggggcaccacgaacccagtaatgttgtggctcctacagactcaaagatgtcctgccttgtgtaggtcttgtgtaagatctaggagaattccttgattatcaagcagaaactcttgttctcttcccttacttttccccaaacaaatggagtctccttctctgtgatgagctgcttagagctgtgagtgggatgacacaaacacacctgtagctaccaccactgggactgtgctgggtcagacacaaagccagcctaatggtcttgcctaaggccaacaatgaccactgcctggctactgccaacgtttattcaaagcccaaggtctctacaatcagcaggtggtgaatcatccaggcttgtttccttcctgtcagggcaatgaattcccccctggttaaagatgggcctgtatatgccaactgggagtcaaggcttcaagtcaggaaccttaggaaacctggtgctctattctactgtaggtgagctggtcctcaagacacaagaaaaagtcctttgcactcttccctcatctttctttaagcagaggagcctcaccctgtggtgaccactgccccgggcctgcagtgagtagtgcctggatactgacaatgttcccttaaggctccaaaactcttgagtcagcttgtagtagttgctgctattcctgagtctgtctctttgagggagtgggcttctctgtggcccagagaagatccagaaatgtcatccaggagtcaaggcttagaatggggaaccctaggagtcagcttggtgctgtaccacactgtggtcaagctggtacccaagctgccatacaaaatcctctttactcttctttttcctttctgattgcagaaggagtctctccttgtagccaccacagcttaaaatgcactgcataacacctgaaaccagcacagcattgagtctcacccaagggcctgtggtgcacactgcctgactatcactattgattattcagtgccaacgggctcttaaatcagcagatgatgaattctgccaggattgggtccttcccttcaaggcagtggtttcccttctggcccagggagtgtttagaaatgtcatctgggagttagggcctggaatgggggactcaggactctgcctggtgccctgttcttctgtggctgagctggtatctaaattgtaagaaaaagtcctctttattgtcccctcttctctcctcatccagagggaaggagtctcccagagctgccagttgcactatgtggggctgagagggatgatacaagtactcccttagccaccctggctgttgtctcgctatgtcacatacggcacaagtccacaagctctgagtccagcacagcaccaagacttgcccagaaagtgtagtccctgtggcgtagacagccttccaagttcatttaggatcccagagctcatcattcaccagtggtggcagggcttgctggaactcagtttccaaccactgggatgggtgatttccctctggctagggctgggctgccggctccctccactggcacttgctgagttctatttcatgctgctttccactgctacaggcagcacatagagttccaatgcaaagtcccacatcactgctctttccctcccctaagtgctcagattctctttctgtaccatacaactttgctggaaacctggtgaggggtggtgtaagccgttcaagatggtctttcccagcatcttctcggcctctttccttaatatgatgttaaaaccaggtactgtgatcactcacctgatttttggatcttataaagtttcttataaaggttttttttgtgtgtatgtggatagttgttcaatttggtattcttacaatgcagacagttgttggaggcttctgtttgtccatcctgctctgcttcctcccaacgtaaaaacattttaacgtccaaaattagttaacggtagtaaaggaaaaacccaagacaagttaaatttaacagagtttatttgagcagaaaaaaaaatggttcaggaacagtgtagcactcaggataaaaagcagttcagagagctctgttccgcaaggagttcatgcacatgtacagaaagagaaatggaaatgacctacagaaatagcctgattgcattcagtttagcttttgccttatttgggcatgttgtggtagctgtcagcctatgattggctgaaggtttggctattaagagtggctgagaataggctacttgttacaagagtatacactcaggttaggttgcagtttgtttacacattaagttaggtaataattcactatgtatggaggtagctttccgccaaacaatagttagtagtaaataacaatagtaataaggagcaatacttaatattgccttgtctatttcatgatttgcttagaacctgctctcaatcaaacaaattaaaggcatttttctcactatgatttgcatattaaaacattctaaaaaataaatgttggcatttggaagctgtttgcaagaaaaattagaatttcaaatttatatctttcttacatttcaaagatgcgtaataaaagttagttgtgagcagttccaatttaggtctctattcttcctcttctctcatcttttttttttttatgatcaactatattcctccatttttttccctccataaactgagaacaatttcaagtttattttctgcaccacacatttcatttttcctacaaatgtgaatgtggtaaatcttaattatgttgtctttctgagttccttacaatctgtcctaatcacatccacctctatttttgtatctgtagaattatcttgttgtttttctcagaaagcctaagatttttttaaaattaaactaaaggaaaaatagataattctttaaacctttttttcaaacatttatataattgtcttccattgtatttgctattttttttcctagagtttgagtttgtttgttttgtttgtttccactggatgaaagatgcaagctggatttgtggactgtccttgaatctgcaaccccattcctgtgcccccgggttgctgggcttcctgactctgtactgtaaacttaaatggtcagttcataaattctccctgagagaaatgataagaaataaaatatggagatttccacaagagaggtagggaggttaacctatatgctgatattttctgtgggcctcattatttctctttttctttctctccttgtatatacacattatttatatatgttacatatattatgcaatatattattcatgttgtgtgtgtgtgtatgtgtatatatatatgttcactgctcaatccagcttagtgctcttgcttgaaagatacatgtaatttatgaaacattatcttagctttacaaatcagtataatcattaatttagtagcataataacaattggagagatctgattcctgccactacaagctccctgccctcacttagggcaaagactacctcagacatggatgtactttgtgtctaggtgtactctgagatatgcaagcagctcagcacagagtttgggatgctccaattaaatgtaaaggagattttactgtagataaaagttcttgttcttctttaccttatactcaccctatacttctttaccttttactcacataaaggaaaagagaggactggtttcttgttcaactactatggcagtattagtttgatggagtaatgtcgcttgtagaagctgtgtagaaaaatatgtagcacaataaacatgctacaaggcttgttaatgtatgtgtggaaaatgttcattcagactgtttctggatgaactggttgttctgctgcagagcctcatccttcctcagtcacagcacatttggtgatggcctggaaggcttctttaaacattttccacacatacattaacaagccttgtagcatgtttattgtgctacgtatttttctacacagcttctacaagtgacattactccatccaacctctactgccacagtagttgaacaggtaaccagtcctctcttttcccttatgtgagtgaaagtattatttctcaaaggcaaagtcttgctatatatacaaacaatacataataaaatgataatattttagcattttagttgtctgcatctgtatttacatgtacaatgacaccacagtttcgttttttatttctcccaggaaaaatacgaggttattttataatttttctgttaaaaaagattccattttgaaagtatttccaaaataagggaatctgtcctgaagataaactgttgagattgaaaatccgaatgactaacaactttaaaaaaaaattctgctaaaaaagtaacatgtcatatcacaacctctacctacatgcccatcgtatccatatatctgtctgtcttccctctggcttcagtgacacatgtcacacgtgtctctcagggaaggaggtggtggctgtggagatgggggcagcattctttcttgtttttgctgtctagcctgacttctcttgtggacacattatggctatgcattgccactggctgggcttctgcctactgcatcaaggaggagcctctactggttataactgcaaggacaatcagagaggtgctacgttggaattccacgggtatacagtcataaattgcaatttaaataaaagcgtttcagtgcctacaagacccaggctccaaattgagggctttggggtgatggggatcttcttctgcttgtttcttttttacttaaaccacattggaaggtaagaattttcaggaggaaaaacattgtcttacttccgtgttgcccacctgctctgtattttagctgaacttcctaaccatggtgtgtggaaggtaccatccgtgatttggggctggacttggttttctgatgccctttataggtctagagatttcagtgtgacccagatgtcagggcaaggatggggaagtactttgtctggaataacttcatgagtggctgcagaaaacagcctacaaaggagtgctccaaaccatccaaagatcgggccgtttgagattccaaagaagcacaaaacacctggttgaccagaccaaagcatttattacacagtctgcagcaatcctctagaagacagcgagagaaatgcacgttctacctaaatacagctctagtgagggaggtccagttatggcatattcaggaaggtttaagaaatttggctcagggccaaggccagtttctttcagtgctttgggcaaaaacctagataactttatcagtgcctgggaatgtttgagatctcggttttgtttgaagcttactgggaaaaatctaaagttggctgggtcacagagctgtcaaagcattctgtgattttgcatcaggagaaagaaaaaagacaggggaaactgggagaccctgccaagaaactagacacacgtgttcgcattgcttgcaggcagtcttctagattggaatgaatcttttttgatattagctaaaaagccggtaatcattcactttcaattatagtaaagaaagttgactgaggtaatactgcaatggttccaagttaagccgaacatattataacatcttgtgcagttgacttggtgcttgatccttagtttcttcatctgtaaaagggataggataataacagtataagtctcaatgggctcttgcaaaaatggaaaacaaagcaaaacatatcgatagtataaaaaatacgaacaggtctggcatacattaaatttatatattctttttcttcctctaccctactttttcattattatcattacaattataaacaaaataaaaccctaagtcttgcaaccgaataagcagaccccatcttggccaaagggatcccaaagaaaccttaaaaattaattcctagtcatgatgggatggaaggtcagataggcctcacccacattatacccactcccttttccagacattgaccggcatttgtgttaaaatagagatcgttagactgacagaatggactctttgtgtcaataagatgccaaattataaataagacctaagaccatgccaggcaagggtaaagtcacacacccttacacttaaagaataaactatgtactaactgccataggtttttgttttgttttgtttctctggtagctaggcaagcactggcctaagacaagcaatattaaaacaatttgcagcccagccaccaccagacatagacccgcagcctgtgttctgcaagccataactgcagctttgattggacaagagactggtatcagtcactttctcgtgataagaccactaactatggactgattccagccagtttacagagggtgcacacttgagcccctttgtatcctgaaaagaccttttatatggataggggctaattgtatacctttaaatgataagtcttgggtgaacatgggtgttatgtaacctgcatgtttattcagtacacatgtgttaggaccaccttcatgaatattcatagctgctcctataatctgttgaatatatatgtttagccagcccatttcgcataaagctacctccccaatgcctcctccttcaaagtgtctgctgacagctaaaggccacacttcccaacctgtcaggagggccaccttgtaggtggtaaacctttatataaaataaaatcttctttccaaatttataaattgtctgaatttttttaagttagcacatgtgtgagtactataattatcaatggcttgagcacttagatgagtgaggccactcaaactgaattcagaattcaaactacttcactattctaatctcatagcagttatataattccagattaaacagaggaaaagcgttaataccatctatattttagtatttttgatgtactagtccactgtgtatcagtctttttaaattaattcactccagtcttcccagccttctctaaagaaaagacaaagtggacaaatggtaagattgaggcttagcagggggtcagtagcgggtgcttgtgctggttcagatcatactcctggatttgaacccagctctactacttattttctatgtaaatttgggcaagtaactaaaaatctatatggctcgatcatcttttataagtcagagaataatagcccataccttaatgagttacaggaaaatttaacaaggtaatcattaatcactgaacctagaggctggcacatgaatttagtttaacaaatggctgttattctttcattaggaatattattagtgattaaaattttgaataaatcagggctttaagcttatgctgccacttaacaatccttttaaaatttctcgtaatttctctagtctctgttagccatgaggtttgccccagattttcacccagggacaggggaagatgaccactcccatcccttccagccagaataagttttaaaggaatgatgagaggccaagataaaattgtgtgtgaaaaacatcttgttaatcaactaacctagaaattatttatatgaaccttaatatgcgtgtgtgtgtgcatgaatataatgtaaaaactgtacatatcttaattttttctacataagttgaaacattaaagcaatgaattactttcagggttaaattacaagtatatcccagattcatcttatatatatagttgtttaatcacattacaagttattctaaataatttattgagtttttaaagattcaactagttagaacgtgcaaatcagccaggttactttccggaagacattatgaaatcactaatatatggatgtgccaattgttcatactttgagatttaacattcaataccattttctagaggctttagatgtggttgaaaataaaatataaattcagaaggaaaataactgtttgagtggataccttccttcttagaaagattgtgtccagtggtgctacttttttatgggaaaggtgctttatatcatccttgccctccaaatagagagagagaaagagcaaatatttttagtaaatcaatagcttccaaacttccagcacatcaactgagtcctaagtagtattcgattttatacaagtattcaaagaaaggtttattataaaagtataactatttataattctatatgttctactaaaaatgcaaccttcatattcctacttctcagaggtgtactaaaaatgtaaaaactaattgtgttgtgatcagttacataaatgtaatattgcaatggaaaagcaccagtatatcattatatttgaaatatgacaaaatatttaagaggttatatttgtttgccagggctgccgtaacaaaataactaggtggattaaaaaatggaatttttttttttattgttctggaggctagcagtccgagatcaaggtgtcagcagggctggtttcttctaaagctctctccttgacttatagatggctgtcttcatgttcatgctatacacatatgtgtctgtgtcctaaattcctcatattaaaacagggcccacctaatgacctcattttaagttaattatctatttaaaagatgtatctccaagtacatattctgaggtgccgggtgttagaacttcaatatatgaaacttcagaggaacacagttcagcccataacagagtcaagagaagttacgccttatgaggaaatgtgtactatctggagtatgcaattgccttttccagcttctagaggcagcttgcattccttggcttctggtcccttccatcttagtgccagcagcagcagtgttctccctgacatagcatcactctgacactgacttgtttgcctctgtcctccagatttaaggacccttgtggttacacttagcctccctgcataatttagaataattttcctagtttaacatcagctgattagcagccttaattccatctgctaccttaattcccctttatcatgtaatataacctagtcacaggtgtctgggaatagaacatagacatctttgggagaagagaaattactctgactatcacacttactaactgaaataataaaaatcagtcttctgtattgagatttagagccatccaggaccccagtctctgacaaatatttttgctttggggcttggaataagaatattaatgacacaagcttcataaaaatctattcttaaaagaagattatcttaaaggttactccatcaaaatgatgaatcaaatcgtataactaatttcaaactgatatatagcttccatttgaattcccatcaaaagtaggcacttaagtaacccttgatcaggcagtttatgtggtagatattgctaggaagtacaagcaaggcacatgggattgtgatacgtgaaaaaaggaaagtaataacaggttcattaactaatagcaatattaaaagcaactagggctcactcatgctgtgagccttttgcaaactatgtaacccacatcggaatgttttcttaagaagccagggaagctgcctgttttcttctgactcttgtcttttattgtttgactattgaccctaggagactgaacaaaatcacaattccaggttgcacctgagtatggcaaagtgtggttttgtcatgcttgagaaaggcctcagtcagaggagcagagagatatacaggtaattaatgtaggaagctgttggcatgcaggaaactgtgtacaaaagttgcaagtgaatccagaagtgttctcggcagatatgcgtgagcaactctacgactcacttcttgttcattttaatctgtacatgtcctataccaatcacactctgttacttcagagtaattgccacaatttctatgaaagccgtaaaatgaaagcttagtgaaaccagctacagtctgtgttgttctggctgattctgatgccataataaatgtacatcattctccctctctacctcccattctatattcccagatccttgactagcagttctgaacaccttgcctgtacccaagccctgcttataatgctgggactgcaattgctctttgctgctatcatcaggcatggacacactatgaagcactgaagtgagggtctcatattcagatctactgcttcttgcccctcagtaggttgtgacaactttagccctatgtaataattactgctgagaacctagtagctcctttatttggcttgatatttttgatatacatgagggccaaaattgctagatggcagtcatggttttaggataagaaatattctgattttatggatggtcatagagtcttttatctacaatccaccccacacagggaccatgacatttaacccttcagagactaaaattgcaaggttaggtggcctaaacttctccaaagggtcaagaatgataatgaatactgttaatgctaccttcaccctttctttcattttgcgttttagctactggggacatgtgatgtatactccattccagaggacagattggcagccctacaaagtgccatctccaggctgacatcctagctaaaaagtcattccacattctatcaattaggccactaacttttgggtgatatgtaaagatatagatatagatatagatatagatatagatatattggttataatggtttcactttttatgcatccagtgtcaaaattattagctacaaaaggatcctttggtccaaagggaagttttgcagaattccagccactcagaaagccctggcagaggcatcgtgggcagaagaggcaaaaccacatgcaatatacgtatgaatcacaaaaagatgagttattgccttctccaggatgaaaggggttttaagtaattaactagacatcaagtggatggtctcttcaaagaatggtaccatattgagagttggggcagtctccaatactggacaggtcagatattcagcagtgggaataattttatcagtctcgatgtaagaagaagcacatgaggggatgcaatgctagtacagtcattcataacctccaaaccagccaccaagggttcactgtaggaggatagggtggctgaggacaaatgctggctggtgtacttttaatgcaccattatttccatttggtttttggtggctctgtgcagtagttactctttggtgggtggtgataggatacaccaagatccgagtgcttttggtgccttcccctggtccattctcattccactttcacagacattattgttttcaaacttgctcctctcaggtacttggttattcagccatgtcatggccagtacccattcataactcagaaaaacaactagaaattgataggttgggtctaggaagattcacgtgtatttatgttctttagttagtagagaacaatgagtaattttcttttttgaatgtagataataacttggaaacatctacttttccccattggctattaaagagatatttattagaatagttgaagcccaaagcctcacactagaaaactactaaggtaaaatacatgaatttacataatatgtactctacaaataatattaactctaattattttaagaaaaagtatatgagaaaaggattgggaagccctgttacacaaatatgaaatatgcataacctaagcacaaaacattgattcccattaaattaaaacaactatctaaacatatatgtaatttccatttagataaaatgtacagaacaggcaaaaccataaaggcagaaagtagactagtggttgcctaggaatggggctgcatggagtggtgtgagaagtggggagtgtaacagggaatcattgctaatgaatgcatgcaaggtttattttgggaaacagttcatgttaatgctcatacaactttgtaaatatagtaagaaccattgcattttatgctttaagtggagggattttatacatgtaaattatatcccaaaaaggctgttaaaaatgaaagtagagtaaccaaatatgtgtcccataatatgaaaggctcaattattaaatacctcccttttacaacggaggtgggaaggggatagagcatgacatattgggatatacctggttttctttgctcctgcttataatactgagagggcattagggccagacctgatatttgatggaaaggctaagcatgttccattaggatgttaacataggttgttaattttaggagattaagtgttacacttcttgctttgttagataaattgaaccacagcaaattttacaaacataatttgtccatattttcataataaactctatgtaaacatcagttttcttgttcctttaaaaacaaaataattcatatcaaactgtcttgaataagaaaggcaaaccagtcacaagtccacaatattaaagcaaaagtaaagtgatgaattttctgcttaattttcaagttcaggatcttcaaaagttagtttctaaagggtacagcaatgctgtttgtgtcaaataactagctcatcagctgaatagtccacaccaactttccaacaaaacacacatcacctatactcaatttgtggcatccagtgtgaaatgatgttaaatctttgcagaaagttttctctgatctttgtcaaaatccagatatgtttattctcttaattaaagtatctaattatatccaaaaatatcagacttcatcatctgatggtaaatccttgtcatgaaatatcttattcttttcttcattatacatggtttcttttctttgttttattttgttttgcatatgcttctatgtccagtcaatattagtttctctattttgtaatcctttctagtttaggaccattgtcatggctgacagctttgagcttaatgcatttcagtcttcgcttctgcaactgttcccggaaaagtcagagaacatccaagtattgccaaatcctttgttcactctaaatttatttttcacagacataatgtcactgaaatctgagttaaataaatcagctttcatgaattacacttttattaatcaattactccaacctggcaattgttgcagcagaaacttcaacaagaagagcaactcccagaatattaaaaatgatattttttgagtcattttgggcccttgatcaatactacttggtctgtaatttttcattgaaaggtagatattttatattatttatagtttatgccaagtgacttaacatatttgttatgcgttgactatttttcagtgtcagaaataatttcaagaaagaaggataaattttagtaaaaagtatgtatgtgcaaatatgtcacataaaagacataagaaaaatactacttagatgtagaggtagatgtgttaaattctaataattttggagaaatccaagaacactttataaaagatacagaatcgtattatttcttcaatgtaagcagcattccagctgtaagaacaataatgagcaaaaacatacaggcaaaaatactcagagaatgatgaatacagccaatagcaaaaccatatccttcctttgtacttgtaatctgatttcagattaaaaatatgtatgttgagctcagtttgtagagttgtttaacctcagtttgtaggaatcctcatgcaagactgctcaaaacataaaatctttgattgagaacactccttcagtctggctgtctttttcagagccacgctgcaatctgaggctcttcctattcaatcttcctcctttctttctctcctttccaaggtgactgaaggctcaccacatctgttcctgtttcttaactctttcatccttcacacgtatttactgtaataaacctggtacatgtctaattcaatcttcatgattgcttcgaagggtgaccaaactgacatagcacgcccctagtcttcctttccaatttcccttaacactgaccttttcccagtcgtcccaggcaactgaatgcctctttgtcttgttaactgctatttcttctgcctgagattccatttttacattctggtagttttagtcaaagtatattcatcttgattgtgatttttgtgataacataattcaacaagacattctctcacctttttaccaaaatatgtaaacctcagagagttatctataaaagtctgtattccttaatggtacaaatttagaaatggaaactgtaagttatatcactttgggcttgaacatttttatatgaatcagtatacatgaccttttggggatgaagactgttattagtaataactagcgtgtgaaaggcatggacttaaaatatatttatgtaagttcttcctccctccctccctctcttttttccttccttcctccctccctccctccttcctttcctttctccctccctccctcccctccttccttgctttctcagtggtatgggagaaagaatagagagtaggaagaccaggaaagacaaagccatgatgcctaagggagagactggcctgagtaggttattattagagagacctatgcacaaacaaggtataccaataatatgcacatcagcagggtattgatgaagaaatcaaaaagatagaaggaaaaataattataagagatattcattatactttcttattttctagagatctaacactaaccttagaaacttgatttggtcatggctgcccattcaacaaaaggaatattatttctacataatacaaccttcctgagcatatactttcaaaaggcctgaagcattccttcaggcattctggaaaggggtttctgaggaaagtgaaaggaaagacaaggttgcaatgttaatatctagactttttgaagacatagtatggtaacttcggggtgtgtgtgtgtgtgtgtgtgtagtttcttttctaccagaaactcattatagaaggcatattgcagggccgggtgcagtggctcactcctgtagtcccagcactttgggaggctgaggcgggtggatcacgaggtcaggagatcgagaccatcctggctaacacggcgaaaccccgtctctactaaaaatacaaaaaattagccgggcgtggtggcgggcgcctgtagtcccagctactcgggaggctgaggcaggagaatggcgcgaacccgggaggcggagcttgcagtgagccgagatcctgccaccgcactgcagcctgggcgacaaagcgagactctgtctcaaaaataaaaagaatgcatattgcataactttatcactttagggatagggtagctagatcatgatgttttagcaatttgccgaaggaaagttagaatattagaaatcaatgagtagataaaaactgtatttaatgtgccatgagaatacgacatgctgcagtattattttgcaaaaaaaaaattttgcttcatataatttttgaaataaactcatacatcattaatatatttaactctatatatacatacttttaagaaatatgcctgcacacttacacattttatatcatctcccaagttggcagttgccatgagatgcttggaaaatcatggtttaatactcaacaccattgaaatgacgttgtatccctgataaatggatgcattaagactctacccaacagggttgcatttcccacctgcattttgaccagtttccttaatgaccttgccagctgatacaaattgctttttggagggagcccagaggagtgatagcaagcttgaaggttttgctacatgttacactagatggcttttaatggtgaaaaaagtggcaaattctgacatattagaaatgcctctttatctggacagtagagaacagcacctcttcttttaagtatcagggaaggggtgttatttaaaaagagatatgctaaataaaatacactaatgaaaatgatgtgccactttttctagtatttgtattgtgacctctgtataggctgtccccattgtgatcacttacacttaactaatccaatatattgtctattgttttcaacataaaaacagtatgtatttccaagacaggagatgtttcaatctcataattaggcatgcaaaatattatcttcaaatcatatgcatgaggtccagggaacagctgaagatcactgctcctcttaggtttgtaaagaaacataattttgtggtgttccaaagtgacttcataattttgtcatgtaatctcctattttgacttgaaaatctattataaataaagtgataaagtaaaaaaacatcggtagcaggaacaagataaagctaatttggcattaacaaccaattttcatattaatataatttacttttatatgtatcatatcaaatataattaagatgttccaggtctgcttaacgtatgaatgacttactgaatagatataaatgccaaataaagcattagctgattttattttaatgtagactcacacgcacatacacccacacgtgcacacacatgtacatacacacacgatgttaatttatttatcctacatgacgctggaaattattcagtcttttaaaatgtatttacacaacaaatttacattgttttatccagattctatgtatattatacattttttgtcatgtacagtctgttttttatttctctattttttggcagtctcagaaaataaatgccatctttacacgtacatgtattcatcattcctcacccactccaccaacacacaatcccaagagaacaaaaaagatgtgaaaatgaaagtaacagagtgtattacattcctatgagtaactgaaatatcttaaaaaataaattggacagcaaaatgaaaaatgtagaaacagacctaatgttttaaaatacaacaatcaaatgtgtaaaggtatgattcacttgggaaacatcgcatgcaatttaaataaagtttaacaaaacacttgagacaataagttgctttctgttcaaggaaatttaccttttaccagcctggcataatgtcatctggcaaaatgtaccccattggtatttcctggaatacttctttcccctagagattctatcagagtattctatagtcaaacatgcatagaaaacagaactatatagaaacaaaaataccccctttaagtccagactatcactacagagtatcaacacagagttacagtataaagttagagttattcaaaccccaattgatcgatatattcatttcactcacttgatctaaacagattgaaactttcacagtaaagatccaattttacctatcaatcattgtggcataggctgtgaccaaaattatgggtccagtagccattttcaatgtagctcaaacatttggtttctgtgagtaagatataatacagctagaaaattataaattgcttttcattggtttgatgcatgagcaggtaggcaatatcataaaactgtctatttcatgtggttaatattttttgtttctgtaaacattaattcacacttctttggaaagttttgctaacagagaaagaaactaatgaaactactgatggtgtcataacttttttctagcaccttttgttggaacataaatatgggttgacatttctttcatttccacataaacctgtgaaggttatcaaaaaacccaaagatgataggtttaaaattacagtgaagatgggttaattagttggaacatcatcttgataggaaattcatacccactcatttggaattcatgtacaatttttgttatgaaaggagggaaaaagtcaaagcgccatggatgcctgacaaacaacagagtccttctctacaaggctgaccttttttaaagtttatacttccattgtatgtgatgattataacaagtgttactgtgttctggcttctttgtattcaagaattgcagtggaacatttagatacattgttggacctctgaaagaactcaaattttcaatcagatagaaatttatataaaattgtactttagagatccttagacaccattttatttttataaatattaagattcagagaaaaggaagctcagaaatggggtgtaaaaaattctaaagagatgatataaattattatctcaaactccaaatcagcttccatggcttagcaataaatgccttcacttttctctccttcacatcaggcttcaatattcttttctaaggaaaacttgttttcagtcatccttagtctcaacaggggttgcaaattgaaagagaggtactaggttttgaagcacagttgcttttttagtcatgaaagaaaaagaagagaattgctaataaagataaaatttaaagtaaagatgatatgttttaaaataaagagtattcaaaatgaaaattggcattgcctgcatttacattttatgctatttttcttttgatataagaaagcaaaaattttcaatttttttaatttttatgaaaataactccctgtctaaacattttcacctatataaacatgtgtagcccattctaattcgagtacatatatatttattcaaataaatataaaattatatattatatatagttaaaatatttttattattattcagaagcaatttacagagcttctattatgtccaggcatcatacaaggtgtgttgatattaggtgaataaaatcagacctggaccttgccttcaagtagaggagaaaatatgttacctattaactataacagaaagcaatatggtaccatgagcatatgcaagaagaggatataatatagttgatttcctgaggaaatgcgatttgagatggaatccagaggttgcatagtaattaaacaactcaaagcaaataaaattgaagaatccctataaatattataagcaagattagtgcatgtgaaaatcttttaacaggatgttgtaagacacagtcaaatgtgaacaaagttcagtatggaaagagagaagcaggttgtaaaagcaactgttaatttctaaccaaaatatgtcattcttcttcacacacattctgtcatgtttcacacacagcaatttcctgtcttaccttacaatcatgtatggccacatgactgaactttagccaatgaaaaatggatggaatttatatgtactgattccaagtggggtctagtaaactttcctctcctgcttctccagactggttgcctttccactaactggttggagatgaccataatgactttgagcattacgtgttgagataggcaaagtatccatctgcttctcttactaagtgacaacatggagtagtatttctaaatcattggtgtgcgacagaatcatccacaaaattagtaaatcacagattattaggctctgccccagaatttcttgtacattaggtctaagaaagatctgagaatgtgtgttcataacaagttcccaggtaataataatgctgttggtcaatgaaccacagtttgagaaccatttgcgtacagcagagtacttcctctctcctaagaaaaatcctgaatattattgagtgtgtaagagaaacagtttatctcttttttattgtatatatttgtcttgcttgttaaaaaggaaacgttacctgaattatcaatatggaacttcacgtaatataaaatggatagtcttctttgtaaagatgcctattctccaatcactaccactgctttacacagtcagcatgtgactcagttctgattaatgttaggaaagagggaatttgttgtgaatgattagaaactttttttaaattgcacatccacatgacaggtattgtggaggtggtcagtttctgccttgtctgaagccagtgcctagacctcctgcagccactttgtgataatgagaaaagacaaaacgagggcaaagccatgtcaataagtgtgacaaagctgctcttcagaagggaaatcttgcccagaataatggaatggagaccagaggcactaacattagaaaccaaaacaattcaagggttgtgctagacggcaatatttcagtgcttcttatcctattagttaaaaactgtatgcattattatatatatgtgtgtgtgtatgcatatgtatgttacttttatatatacatacttatatatatgttacttttaagttgcttctataaataaaatcaaggccaggtgcggtggctcaaacctgtaatcccagcactttgggaggtggaggcaggcggatcatgaggtcaacagaacgagaccattctggccaacacggtgaaaccccatctctacgaaaaatacaaaaattagccagtgtggtggcacgcacctgtagtcccagctacttgggaggctgaggcaggagaatcgcttgaactcgggaggcagaggttgcagtgagcagagatcacaccactgcattccagcctggatgacagagcgagactctgtctcaaaaaaaaaaaatcaaatagaacaaaggagatatatgctgaaataatggaccattatgtagtttattcagatgagtactcaattttttcttccatgagtagttacgtaaaattttttcagggctgctagagctgagaaattaatcactccagctccagctgactaagaataactcatattactaatatcttataataatttaacttatcttgcaatatttactctaaggtatgtaacttcaattttgctactatttgaggcataaaatgccattacttctatttcaaatcactaattttatagagagtttcatgaataatagtaaaaacaagttattcttaatatattagagagctgtaagatttgcattattgacaaggaacttaaatgaaaaatcttgacttgagctttaagaaattattcatcagttaaatcggtttttccagagtaagtaacataatttatacaaacatgcttgatacaaagtacatgggcaaagtctaaaggcatttctgaaaggaaaaaataaataaaagtaaaagaagataagctcgagataattaaacttcagtgttaataaatctaaaattttcagttattcaatttattaattattaagatcatgaattactaattctcttttttcttacaatagatggcattttcttccttttaccaaaaatcaactcattcatttttttctctcgatcccagtctttctctttctccggaatttgtaaatattccttatttctactaggtgttcaacctcactctcttacctgtttttatcctataatcacttaaagttcctagctttcccatccaaaagtgagaaaagaaaaaatgcatcaacaacagtctgaacaattcattcactctctcttagtacctcatctttctcttcctttatatagccagacttacttgaaagtgaatatcaacattaaaaaggcaaatgactacaacaggcaacttattatgtcaactgtgatggcctccaaatttctattttacttgtatactttttatgtaagcttagttttgattattaatcgtgtatcaatatatttttctttcttgaagtcatattctttcttcacctctcttaatattagtggagcttttaatgtatctttaatttgtctggttttgttagaggcagtgggtgaagaaatatttttacctcttaattttccaataaggaaacaagaccgtgaacaatatgcaaaatagcaagtgatatccaactcggtgtcaaggagattgcaaagaacagttggcacagaagcaaattctagagcagtccaactcaaaatcacatttgtggactttgctgacatagacacactttgtcagtggtgctcacagaaataagtatagaaatcatgaatagacttttatcttatctctttactgattgacagttttaaagagctctatgtgattatctcattgtgaaccaatatgaaaaccagacccgactcagagaaacaatttccaaagaacactatctattgaacagagacagcaggtattcatttgtagccgttcttattgtctatggtgtaatgtgagataatgcgttattgaattatgagatttttcaagaaaagccaaggagctgaaagtttatataaaataatttcacgtttaatattgttaactaatgccattgaaataaaagactcatcatagcgggttaaatgtgttctatagtgcctttatggtaaacaatctttctctcaattttctcgcctcctattccagtatcaaaatactccaaattgtattgtgtttttacattctaagattgttctcactaacatcatcattaatcttcatgtggctaaatatagtaaatatatttttaaattcaccatattctttaccttagcagaatagggcacccttaacctgtactaactacttgaagtattttttttccttcaggtttccttccatgtctccaggagttccttttcaactatatttattgcctttttttctccaagtttacttttaaatgttggagtaaatcaactctcttcctacattagaatctcatctaagaagtctcatgttttcttatgacttaatttaccatctgatgcagacaggacacatattatatcagaagcccagattgacatttcttgcatatactaaatgcctttcataaatatcatctccaatatattttattagtcattaactcttacttattccaactcctagatattgctgatttcaatctagcttgatatacctttatcgtccttatctaaaacaagctgtattgtaaacacccttactgattacattaccagtaagaaatccagtgaatgtattgcccacttttaatatcttatacacagcacagccagaatagttttgttgaaaacactcatgtgaattagggaatttgctcttaacatcgttcagtcttccccttttccctttagagaaacaggaagcactagcctccatttccttacgtatttctcttcagacttgttttgtgcctttttctcacttgtcgtttaagatccatccaatgcttggcttcttttattttctcaaatggatttttcgatttcctacctcagtcattttactttaccatttttttgtcttgaaatgttcttttcacttcttcagttaactccagctttttttttccgccaagaatctttccttctcactcactccattttcaagacttgttgaagtccatggcttctacattccagtagctgcttgggtttcctctcgatgacacttgcattcatttattcacatctattttcctcattgcactgtaatctccatgcaggcagccattgcactggttttctctttcacagcttgaattttctcctacatagtgtatgtcacacatatatctgtaaaatgcatgaatagatgtttccaaatttgggtggaggtgaagctacctttcttttatttttattttcttctttcttttcttttagctctacaaaataaacaattactgattacacatttaaactattttcacatgttctaacatatttaacctattaaatattctattgatattctcacatgattttacaaaccatataaaatttaccctttatttgttttatttagctagttaagatatacatatatcttgtttttaaaaaatactgaaaaaattgcatatgtattttaattttactctaactggtgtacttattccataaagtttgtcaaaagtaacttcttattactgtatacctatgtgtgtgtgtgtaaaaacagatagaatataaaattatttttagaaagtcaagattctagtattgactccaggtaaacatcattgatagttcattaaactatgctaccttttgatttctgtccatgtaaaatgggaaatagaaaaatggaacagtcacagcataattattcagtatttctaatgaactaataaaataatgtgaaattcctttgttaattttaaaatgttagtcaaattcatcctaccattaattattattaaattaaacttgtaaaatgattccacatctttattgtatattaaactcagatgtagcatttaaatatataagaaaaagagttacagattatttgttatacttttaacaataaatgtaatattctaatctttggagtgatacagatttggttttgaggattttctttcatttttgcatatttaggctgttgtctccactcaaaaattccttacacagtctcacatattttctctttagaccaaccatctaattgccatttttattctttgctttataatagctgtcattggataatggaagaatcaatcaaactttttttccttcatgtccctgcagcaacagaactttattatttttacttcagtgacactgagaagcttgaatcaatattgacaaaacatcaagtctttttgaaaaactgctatgatagcactcaaagcttaaccatttcacatcttttatagccatggaaactcaaaatttatttttctcacaaacacatacatcttaatcccttggaaaatcattctgctgcatttgaaatgcagttaccataattgactttcaaggcacagaactgggattcatctccatatctgagaatagaatcaagccctaaacaattggaactttataatcaggttttgaagattaatgtttctttagaaggggaagctggtcttggaagcaatcggattttcttcctgctattgatagaaaagttgagtttctagctgaactagtagaaaaatttatttattgataagtggacactttagccctggaaacaatttacacttaacccttattgttcattgatattgatcacttgaaaacgctctgaaccacatgcataacaaaacctcttcctattgaactactattaatattattcaatatattttaatttttaagcagtaagatgaataatataataccctgttacttaaatagctcacatactttactatccaattctatgattactctaataaattatctcaaaatccagcatcagatcccggaagctgttttgtggtttggttcgttttgtttgttttggtttgtttctttggctctttttgccctttagtgctgaaaaaaaaattatgttacttaactgaatctccagcgttgccattgagtaatgctcctcaaacaggacgtatcactcaatagttgatctcatacttagttatgagcttaaaacttgaaaagagacagaaaatctgtaatgcagtaaatgggaaatcggactatggagcgtgaatgcataaggatatttgttttgtgaaattcatttacacgagtcttctttggtcttcaaagcaacatgtgttttcactaaatacacttgtgctaagtacacagcctgtgatgctggcatcttcctccttttacaagtatggatcctaagtcaaatctcattacacagtgcagcataacagttgatagatttctaactgtaacgtaggcctcccaaccatagttccagggttctttgtattatagcatactgcctattccaatttaaatataagtgtggaggttctcatcctctgttctttcctgagttttgagtttatgtgccaattattattttttttttctgaatccctcgctctactttctcttctttgtaatcagtggctttaatatctgagatcactggcttctgtgtaagaaagcgttacacagaacgctttaaaactgaatagtatttagtgtttttaaaactaaatagtacttagtgatttgcaaactgttggatatttaaattgatgtgattgtcatcaaaactttaaaattaaaaaaaaatttaaatcatggtgcttttaaaaaccactgagagtaaatacttctatatgtgtcttttagttatgcaggattgtacaggcatccaaactatgttctcataaaaccaattttattttttaaatttattttttcattaaagccaattttaatgtgtttcagttcatggttgaaatgtttcttgatttttatgtatgactcataataatacctgaattaatcatggggcctggaaaattagtaatagcagttctaaaagggaaaataggtctattatgtatgtgtgtgtgtgtttgtatgtgtgacacacatttttacacatttaacagagagatgaattcttatatctatacctatttattaatctatataaaagtaaatggcacatcctttcaaattagcctcatttaatatgtctgcatctatattatcatttaaattttcttttttaacagctatgtactgaaaacaaattcagacttggttttctcacatggcaaaaatgaacccctcactttcagtttatattggtctacgtatacagtggcttgctgaaggatttttgcgcaaataagttagaacataagtcaaacctcttgtttcaaaagagtcaagcatgatagaaaacactaaatttatttaacctccatgttccatctagcagaattaaactttccaaagaggaaaaacatagattgatgtttttaaaattactacagggtagaaactatgcttctagtactctacaataagccaaacttattggcagaaattgtccataaaattgacatttttaagcaaatttacattccttcatcagtgttatgcatgccattgcagacaaagttgatgatttgaattcataattgatttatgagtgtcatagaaatgaggcagaaaatattggactttgttgccaaggagttcattttgggcaaccagtaattacactgaggattagattgtatgaatttggaaaagtgtagaagagtccatgacatcagtaattacaatgaaaataaaatgaatatcttatggaatatgctttcatatataattcctcctctggatattgtattttctttatgtccattttcagagctggctcatattactctattgacatctgttttaaagtggagtaagaaaaaagaactaaagtaaatttttctttaaacttcatacatgaaaataaaagtaagttgaggatgcaatttttaaattaatatgaatgcacttccataaacacaatctctgtcattaatctatctttctgttaatgactggccagctgaaagttggcaaattcattcattttaaatgctagaggcattaaaagttcttgttgaataggttattttgttttatcggttaaacatgcacatacatatacacatgtaaacattttattcattctatagttcagaaagttttaacaataagatgttcaaatcttactgtcagcagcaactctacaactaaatcatctttttagtaggaagctccaaagttaaacacagagtttttaggaatattgaaatttcctttaagccttgccacacgtcattcaagtcagaatatttgatatcactttattataattttaaggaaatacaatttatatatattttttaaatgataaattcaactaattataatttaagtgcatgaataaaataagtatatttataaggttggttacatactattttcagaatgaaatactcttccagccatgtcaaaattttgcctgatgtctcctaaaatgtttatttagtgatgggaactaaaaatgttttaagtcacccacaaattgttttgcttatgaccagtagatcaatcttagtaaagagatgttttcaaaatgtcagtgtctatttcaagaatctacaatcactctcacttttttataaaataaagtccaaaataaaattatcttaaaatggatttaccttcgtggatatttgtgctttgaacatttatactcggaattttttttgagatggaaaaaaaataacctggaagatattaataaattatttccccactgtattggaaagtccagtataaatgaaataaaagcagtgtcaccataaacaggaaataagtggtgtctattccaaaaatatgagtataagaacagtaagttttgatatatttggaattgtgttttcatggccagtaaatgtgcatatctaaactcttaaataaatggcatctatcacttcaaaaggtgaatgaaaactatcaacaataaaagggtcattgtaacttgagtttccaagctggctttatttttcaaaccatagagaggcctcatcttaagagacagctatttccctgaaagaaaagagaggttcaagttcattaagagacccttccatatctgaagtgtaggttgacaaccttcatatagaaaagggagaaatcagagtattttattaatataaaaggaaatccaacccgacagaggtggtggaaaacctattcattattgttccatagatagaggaaagaaaaagagagaaaaacgataatacatttactctaagagatcagtgtccttgtttttttctaattctctgaaaggacccttaataggggtatgaaagaaatacacagacacagtttaaggaagcctagggcatcagtgatgctggcttgctttgcttagaagagtctggagatttgtatacttcatgataaagcctcacatcctcacattcagcttggcacaataccctgtatgtagtaatagtgaatcattgtccaaggaaagtgttcagttgaatgagtctgtggaagatctcatggctcttgagacaccgggagtgatgcataggtaatccagaagttcatgcacgctcagggtcatacatgagctgagaggagccacgaacagcaaatttagaagccgaaaaacagagttcacaacctttgtgatcagagtcaaatatacttcattttcagtgttatgaagaaagaaccagttaagaccagtcccatctcatagataccagttcagtgataaaaatagacaaactgtgagacaaaagtggatttgtggcacttctatgttactgccatcagaccccatcccaaatataaccagatactatcctagaggtaagtaggaggtgatggcggaaggatgatgtgaaagcatgaacaataatcatgaggcagtttacatagaagaagctgagacgtaattagtttgcaagttgaattctcctctttaccttaataaggtgattatccagaagacaaattaagcacatttcagaaaatacagaaactaaattttatttgaacgtttaaattgttaactcttacttgttcaatagtatgttattttcctattgcttctatagcaaattaccatacatttagtggcttaaaacgacataaatttatgtctacagtgctatgggtcaggggtcaccaacggctgggccacaaactggtactggtctgtggcttgttaggaaccagggcgcacagcaggaggtgagcaccaggcaagcaagcaaagctttctctgtattttcagcctctccccattgcttgcattgctgcctgcgctctgcctcctgtgagatcagcagtggcattagattctcacaggagcagaaaccctattgtgaactgtgcatgggagggatctaggttgtgctctccttatgagaatctaatgcctgatgatctgtcactctctcccaccacccccaggtgagacatctagttgcaaaaaaacaagctcagggctcctactgattctacgtgatggtgagttgtataattatttcactgtgtattacaatgtaataatagtagaaataaagtgcgcaatatatgtaatgagcttgaatcatccccaaaccattctccccaaccccagtccatgaaaatttgtcttccacaaaactggtccctgatgccaaaaaggttggggaccgctgctataggtcagaggcctcagttggctaaaataaaggtgacagtgaggcttcattccttctgaaagttctcggggagaaactgttcccttaccttctccagcttcagagactgcttgcattcccttgttcatgaccttttgctgcatttccaaagccagcaatatagcatcttcaaatctccctctctctctctctctctctcaatctctctctcttgcactcctgcttcccttttaaaaggactcttttgattacattggtaccagggcgataatctaaaataatctttccatctcaaggtctttaatcacatctccaaaattctttttgccatgtaaattgacatattcacagttttgggggattagaatgtggatatctttgagagagatactttctgcctatcacaaatgtgacatgtatataaaaaaatccaaacattcttcctagctcacagggatctttacttaaatattaagaaaagaattgagatttgttggataaagaataaatatatcacacatatattgggttagagaatttacaacttattcattccaagatcacctacaaaaattgaaattaagttctgtacttaagtacacagttgcggcttttggagccttttgttcatcccccacaagattaatttagagctcattttattctttgatgtgtgttgaaggtaaataatatagaaaactggtcagagatgacaaattttttcttaatatctatactcctcatcatcataggtcacaaaacacagatttttgttcggcaatatttccaaatttaataaagcttatatttctcagcctcaatttcaaataggtatggccatgttattagattctgaatgaaatttatgtaaagtagtctatcagatgtccatggacagctctttaagaataaaaaaaagaatgtctttctctgttatttcctcctggaaattgctacagttttgtgttataaggcattatctaagaacgtaaaacagtaagacaaggggccctgaggtagtttacctccaaaatgtctaccttttcatttctatttatgagaaaaaataaacttttatccatttttaccactgttagtttgaatttatatgttgtatgtaattgaatttaaatctaactaaagtaggcctcataacggatcaaaaatctattatgtcagtgaaaaacttcgcgcagcaaagtaacatttctatactaagtgaacagtcaaacctgaaaacttctttaatgagtggttgctaagattatggagacgtgagtacagttaagagggcaaacaagaataaatgggtttctccaaacaaagagataatattgtaataaatgagtttatattgcaatagctatatatttttctcatacttttaaaatctgttagctagtctatagaaacacaagaacaacataaaagtgagtcctaaactcagctttcatgatagcatctagctgttagctatagattaaaagaccacaagagtgtgagatgatgatgtacctcctaattcgctagaggacctcatatgagatgcccatctcccagttggcaagaaagtggcagagccacagtaactgaagaagctatgacacatgggacaaaggaataccttgttagtaactagatttgtgtaaagggtgctaagagtagagtttaaatgcctgcaccattgaatttatagattaatatgcatttctttttagtttcatagtagtagactatacatatatttctattgtgagagcctgaatgttatatttttgggccccttaaaattaaagaagaaggttcaatattcaagtttatttctgagtgctatattttttatcatctactcaggcatagcagtgggcattttattaaaagaattattcaaattattcatattttgaacctacattacccacttgtaatgttttccttatgtaatctgtagcactttctgtaggatcaatcttgtgtggtcctcagtgtgccacgcccctgcaccattgctcacacagctaatcccccagttaatacccttcgcattcttattcattttatttccgaatttaagaaggtgggaaaatattttatgaataacttcagcagagaatattcaaaagtctctgggattatattaaaattttatacaggttcttcagaagatatccattttgtttctcacacacacacacacacacacacacacgcacacacacactgctgcaaaggttaaatagaaacagaaatttccaaaatttcttgcattatgtaatttaaaaaacatggtgtaatctcctagccacattccaaattactaaatttcactccagaatagatgatcaatacacaggtagataatagataaacaaatatgcagacatgtacatgtaaattaaatatatattttttatttatatttggcaattttatagaaaaacacatatctacatctgtatctgtagctatatttacatgtagtctaagttcgtatttatttttatatttcaccgtcttacatgtttatttacgtattacattttcattaaaatttcctgtccattttccattaacttaccaaatgtacatatttttccctcttgggttctggcattcttgtcatatttatgaagttctttcttatcctatgtttatatacacaattaaatatattgacttctatttatattttagaaatattttatatttaatttttctagaatgctttgatagcaaatgaagagctacctttcccaataaaatataccttaacacttatttttgaacaaatctcataatatctgtcaccagcttctactgtactttcagaaatgattttcattttataaggaattgccatttctttgaggcaaagtgacaggtaatttttcagttagtaaattcatccatagggaacatatttttggctccccaaaatctttactgaaaccacatttactcctcaactttattttttttctaacacatgtatcacccaatcctgaaatgttcattttctcaaaaattacaatcccaagctcagcaatatcactgccatacctgcccagcttgtgagttcttctcaaacctgtcagcctgggtcaggatgcctcttccactttcccactgaattccaatgggatgacagttctgttaaaagtgtgccttctgctgaggtccaggcagaaacataggattttaaccagtacaggtgagcacagaaatctgaataacctcacaaaatatagccagaagaaattcccagccctatgtggccctatttcgacattcaaaaagaaccatccattaatcaaaagtagtttaaaataattctaatattcttgtgtctcttgaaactcaaagtacagtacttcacagatgctgtgttgctcttcctcttgttctccacatggctcatccatgaaggggccttgaacctctctctgcctctaacacacttcccttcactcaacgtcactcacaggacctggccacctggccctctgctttcctccttttttctatttctttccattttctttttttctcagtagcaaatatgtctgtgcctacaaacaccccattttcacttttgtcctatcccgctctaattaatttgatttgcatcataaattataactctgtgtgtgtgtgtgtgtgtgtgtgtgtatgagagaaagaaagagagagagaaccaagtagtaattaccaaaatgtccttcataggtacagcttagtaagtctatcaatcctaatatgaatttttggtctatttttattatttgctgtattgcatctttatataacaatatgggaatatagatagagacatacttccagctccaatttctcattataaaagatgagaatttaatataattttgcttttattttaaaaaagaaaatgaactctataactatgcctcaagtatggcttaagaattcaaagattcaaattatattttacttgcacattttcagtttacagattttgaaatttaaaagaaagatttatttggtattccttcttaattagaatgactaatgtttgttctcttgggtttgtctgttaataatttgatttaggtgcatctgtcatacaatttagagactaatatttttttaaccccaattgaagttttggcctttattgtggaggttaaaatgctgatattattgttttaatgtgtttattttgttcttactatctttgtagacttgtgtttttccaccttttcttttcattgtttatagtttttaattttaataacatgttcttattttttcagtactatacaagcaatacatcctgtttttaaaatgtaaatacaattatttacatttaattctttaagcaacatattactaattgttaaaatactgaatgatattatgccttttgtgtgttcatagtatatttaagtagtttaacatatttttgccaacaattttgctcattcaaagcattggtaactttcaataaaattgaagtgctgaatcataattaatttttaatatttttacagtgtatagtttcttgttttgtactatacttggctttaatgttgctgaaaacaagagtaatctcagaccaatataccttactgtggagattatatatatatattgctattgtgaatagtgcttcaataaacttgcatgtgtatgtgtatttatactagaattatttatattcctttgggtatatacccagtaatgggattgctgggtcaaatggtatttctggaatgtctttctgagctgtgtaaaaaggcaaggacatttttaatgtattttatggataatgatatttgaatcttaataacattcttacttatatgccatatactctgttaattgatttatcattaatgttccacctgttccaccaaattctcctccaaactccattggaacaagttatttctatgacgagatacttattaacatcatttacagatgagtgaactaaaacttagactaagaaatttgcacatatgcaattctagaaattggcagaatttcagtttgttacaggaggtagctagtcaggcgtgagcagagcaggggaggactccacccacccccccaccaggaaagtctgatgaccagcacgtgatggtcaggctgttgttaactgtctctataaaatactaattggtcacagccagcaccagaaaaaggcagtctccctatagataggaaacacttgaagctggtgatcagcagcttcctgataagatctcatgagctggctgaatgggctcaagcatgctcattaaaaagcaaaatggcggagtttaactggtatatgaccctccagggttatgctgcaggtaaagggaagaagcttccaaggaaagcttcaggtgagcacgcataaactccaggaaacacactgagcagactcacctcccaagtgccagcaggtcaccgcgcatgcgggaaggtcaccccaagggaagaatcaatggaaaagggacacaaaggtgccggaagcaggccaacatataaaaccctaagtccaaagtcacatgcggtgcttgtcctgcaagaagaggtcagcttggccctcttctaagtgtacctttctttttattcctgctcgaaagctttttaataaactttcactcctgctctaaaacttggctccgtcttctttttctgccttatacccttcagtctaattctttctactgaggaagcaagaattgaagttgctgcagacctgtacagatgcgttccaccaataataatttgagtcagtgaacgggagatggaaaaaagtaagtagatttgagggctatttttaaaagtataactctgttggttacaacagtactctgtgatgattcaacattgaagagaagaaagagagaggagacacaataaagctcatgtttctggctaaagaatccaattgtgtattatttacatttattgaaaatttttaatattttatggcaccatttattttgatccttcattgaaccctctggtattcctattttcttctccctttttctgaaatattttacttttgcagtgtcatcctcccctgtttctgctttaccttaagcatactataaaaatggattctttctgaacatacgtaggtcaccgtccctatctatgtagtactgcatttgcagttctggtacacagcttatgagaaagcactaatgaaaatctcacattcaaggttcagtttttagtaggcttccattatttcgtaagtctgtttgatcttactgactttctctgccatctctcaaactaattatttttatttttaagacagtctttctttggagtgcagttgcatgatcttagctccctataaccttgaactcctcacctcagcctcccaagtaactatgactgcaggtgtgcacaccatgcctggctaatttttttttaatttttttatagagacaggatcctgcacaggctagtcttggaactcctggcctcaagcaatcctcctgcctcagcctcccaatgtcctgggattacaggtgtgagctgcagagcatgtccagtttcttcaatgctctacattatcagaatattttaaaaactacatttcctacaatgtcttggcaacaatatgtttcttatccctactccttcacagagtgaatcctttgtatggaggtaatgtcctagaaaatagtgcaattgccaatctgttcagcctgtgctgcttctatcctgatccctacatcgaactatacacagaccttccaatgatctgttttgtggaagttgtcattactgatggaagaagtatagggtatcttcctgtttttatttagttagactatgttttatgaggtcaattctgtattatatttgattccaatgcaagcccctatgccttaagaaaaatggagtttccttaaagttcttgacagcatgtgtttcttagtcttgtttttttctttgtgatttttatacattgagcttttatttagtctgtatcttcatgaatattttagtattaagttaagaaactgatttgagagctgctagattaggtgtagtttattttggaaattgtcttgatataggaaatttaatttacagaaatgggaaaacaatatactctgtttctggcttcagataattaaagcagtgctcacttcctcattaaagtattaataataatagccagagtttttttcacagcattattgagatataatttatatactatacaactgacacacaaaaacgtacaattcaatttttttggcatatttccagaattgtacaaccataccctagtctaattttagtagatattcattcctccaaaagaaacctcgtattcattatcagtaatttaccttctatctctatagatttacctgtttggaaatgtcatataaatagaagcatacagtatgtcatcttctctgaattgcttttctcacttagtatattgttttcacgattcatccatgctgtgtgatatgtcagtacttcattcccttttgttgtgaaacactcttccattgtatagatacaccacatgtaaactacccactcaccggctgatggcaacttggattgtttctactttgtatttattatgaagcaggctcctatgaacattcatgtagaaattttcgtgtggatgtgaattttcatttctctggcatgtatacctagaaatggaattgacaagctgttttccaaagtggcggaactattttacattcccactagcaatgtgtgagagttccacaatttctccacaatcttgcccattcttgctttctgtcactttattatagtcatctgtgatggtgaatattaggtgtcaacttgattggattgaaggatgcatagatagctggtaaagtattgtttctgggtgtgtctgtgagtgtgttgcagagactaacattgagcaggtgaactgagagaggaagacccacccttaatgtgggtgggcaccatccaatcagctgccagcacagctaaaacaaagcaggcggaagaagatgggatagataagctggtttgctgagtgcgctttcatctttctcccgtgctggatgtttcctgtcctgtgacatcagactccaggttcctcggcctttggactcttggacttacaccagtggtttgtcgggggctctggagcctttggccacagactgaaggctgcactgttggcttccctacttttgaggctttcggacttgtactgagccactactcgcttcctacctcctcagcttgcagatggcctatcgtgggacttcaccttgtgatcgtgtgagtcaattctccttaataaactcccgttcatatatacatctatcctattagttccgtccctctggagaactctgactaatacaccctcctagtggttttgaagtagtatcccctggcggttttgatttgcatttctttaatgacaagttatgttgagactccccttgtacttattggcagtctacatatcttctttggagaaacgtttattgaaacccttttctcatttttatattgagttatttgtcttcatattattaaattatgagaggtatttataattttgaattcaagtcccttgtctgatacatgatttgcaaatatttccttctattctggaggctgtcttttcactttcttgatgatgttattggcagcacaaaaattttacattctgatgtacccccattgatctacttctttgtcacttgtgtttttcagagtttaaacctaagaaactacttctatcttttattctaagagttttataattattattcttacatttaggtctataattaattttgagttaaattttgcttgtttttatctttagcctgtctactcagggtttacccctttatcagtaaaatttatttattatttaaagattgtgctgtattcctcttagctagttagattcgaaccctttattgccaactatgaatgtggcttggatactgctatcattatttagggaatttacttcttttttggtcttagccaagtactagtactttggaggttccccctctgattgcttcataaaccttgcagctttgaacaggcacacagcgtccacagccatggatgtgggtggttttatttttgatcttttgtagttatttagatcttttgatctgagtagcttattgttcaatcatcctttggtcagaagtcgtgtttaagctccttgtgtcggtgagcctccccctgtattgatgggtcattgtgcaacatgaagaatgctttaaatccttcccttttcccactttgatcacttccgcgtgggtgcaaaccagcgcatgcgcacagccttctcgatgctcagggttgcctctgatctcaggacagctcttcttagctgtcctttcccctgattttctcttttaaacttctggctgttctcctgtcttactagtatcactgaaatgccactttactcttaattgctttccaccaagatctttattacttttgacaatgcctttagatgaagttcttcattctctgttctaaataaagtcagtcccctcaaacaaagctgaggagctcattatccttaagtcctgacctctctctcgtcagaacttacatggtactgcacccgagctgagggtagacacccgccttttccagagtcacatccctactccagtagagggcagtgtttgcgttaggtttgaatgtttgaatgaagaatgttcctctccaaaattcatgatgaaacttaatccccaatgcaacagtgttaagaggtagaaccgttaggaggggatgaagccatgatggctccatcgtcatgaatggactggggctttataaaagggctcgaggggacaagtttctctcttccctcccttctgccacgtgggggcacagtgtttgtcccttgggagggtgcaatgttcaaagcatcatcttggaagcagagagcagccctcaccggacaccaaaactgctggcactctgatattggacttcccagcctcaagacaagtgaaaaataaatttctgttgtttataaatgactcagtcttacgtactttgttatagcagcacaaacaaattagaccgaaactgtgcctgtgtttgtgggaagtagcagaccctggtcttcttggcttgcccctcatgatgtgaaattgaagtcctttgaaaaagatggggtggggtgattagggccccagtattctcagcttgccacacctggggccacctttggctccgaaagtgggagctggatggaaaaaggcatagctggtgctctataccacacctgcctagaatggagcttctgcaatgtgcggttggtagtagagggtaagaaaagcaggcaacctgcccctccagggatgaaacatgaagctgaggggagagggcagtgcagtaactcagtgggttatgactcaaatgccccacctggctgctgctcttactgagatttagtagattttcttgattgaatgttttagcatttgctatatgccctttggacaatttccagactttaaatgattgtgttttaaaatgttcaccagttaaaaggctggaaaaaagggccactgttctccttattcaaccattctataagtcctgcctacactactcttttaatatttttgaaatcttggttattacaaaatatagcaaaactttgtcttcaatgttccacatactgattcagaaatacagcgctcttagaaatcaaatataaacctacaaatattaataaaaggatagatcttaatattaaagaatctagtattttcttaaattagttatgtgctgtatttggctatagttaaatgtttagtttatttacgcagcctaattttattcactaatacacctatttagtggcaattaccaaggactctagaaacaaatttctgtgtgtacgcaggataaaagtttggtcccgagtcaagagattgctttataattgatagattgctaatgttaatttaaaataaatgccacccaatttacttgataatagtacttatgtagcaatattcatttcttgcgattatgtatttaaaatatattgtccatcaagtattatctattaaaaatattatcttctacagaattgctttattaatttcttttacattttttatgcttagccaagtttattttatgaacattacttttgttatcagttcttatcgatttaatatatcagccacattaataacagagtagcctaggcaaaatcctccaaaacaattctatcatcttcctctttattgtatatcatatttcttaaacctaacaatataattttgtttcaaagtttgtagagaatggacttcaatctctctctgagataaaattattatctcgaaagctcaggtgagataaagatgaaatgagtacaggcaaacctagaaggaaatataaaaagcaagagttgtaaaaaaaaagtttcagaacacatttcttagatttttattaggagctttttttatctcttatcttcatattagaagcattaatacttatgagtttgttaccacatgaaattttgcagttagagacataattatatacacatatacacatatgtacatatgaactatacactgaaagggtttccctgagtaatgtaaattgacatataattaatgtctaactctattgaaattcataggataacacttatttttcatgcatcttttattcactattacctagaaaatagactgtagcaaaagcaaatcaaaacctcggtttggaaacatagatcaacaaaatataaacttgcctatatgggctactgcagtgacttcagcttgtatgaaaattcttgtgaagacccactaaaaggtattattctggtagctttccattttatttatttgttttatttgtgtatgcacacgtgtactcctgtgtatctatatctaaatttctatctgcaaattttgctaatatatgattctgtagtgaattcagcttctataaaagttcttgtgaggacccactacaagatactatcctggtagctttcagtgatgtgtgtgtattcttatctgcaaaatttgcctatatataatactacagcagcttcagcctttacaaaatgtcttatgaggatgccctgtaatatattatccaaggagcttgaatgtgatttacgttgagctagtatttatctttagcctttctgtcagttaaatttcctacgtaacaactccagaattttgtgtcttttaatgacagccagtgattcagcccatgattccgcagactggcagttttaattgggctcagttgttggttcttttggcttctttgtctgtggtaagctatatgattggtggccaaggcaagctggattatgaaggccttgtctgagaatgctattgactaggcccctctccaggtaatggcttatcatcaggcaggctagcatgcatctattcacatgattacagggttacaaatgcaataagagagtgaacattaaggtgtcagcacttctcaagcctctagctgtgctacatttgctacttttcaattgtgcaagataaatcacatggtcacactgaaagtcagtgggaaaacagactgcacccttgatgacagaagctgcaagttgcaatgcaaggaaaatgagtagagcagggaaactttgaggctgtgtttgcaatctactaacctttggacctgttgattacatttcatctgaataatacggcaattgagtttttagcttattgtttaaacagcaaaaacgacatcctaattgtattgttctgagtggtaattttaaaacaatttatttcttcaaggattagtttctctggctgtggtggttgttttctccactattctgaaattaagaccttgaaccttgaaaacaaacaaattgagcttcagaatagtataaagtgcactgtggataagtttcttgtttttttttattctttaattatttttctagagtcatgtttttttcctttgagattaaaataatttaactcaaattctaatataattgaaataggacatgatcacgttaattttctctttcaaatatttctacttaaaaattagttgtattaaaacaaccagatggatagatatagctatgtgtgatatgtatatgtatgtatataaaatatatgtgtgcatctatatatcatatattttatatatgtacatgtataatttatatggatttataatatacagtcatatataaatatatacatcatgcatttataccatatatacatgtatggggcaaaattaatgttactatgtgtttgaattatcctaaaaatataataaaagtttaagtcgattataaaaaatgtgacagtgtaaaaaatcaaatcttccaaatattataaaacattatattttggcttattttatttttttccagataaaaatctagatgtctttagattttatttttggcacagcatttattgcaccaggaaaaatacatgttaagttacttaaaataatttttattaaattgtttaaaataattgtgctttatttttactaatagcaccattttcttccctccattgaatttcagctctcaaaacataaaatttactaattataaatttttaatgcagagattctcaaacatggaattgggaaaaatttcagtgctgtatttagttgtgaattatgtagcaaataatttgtgctgacatttgagatatatatatatgtatatatataaaacttcaaaactttaaaaaatatatatatgtataataaagttatatctgtatataatttagagcaaaggcagtattttctagataataatgtcatttttacttcttgtcagccatattttttttggaataaactagaatgaggcagcacctggtcccagggaaatgcatgggaatgttgtataggagaatgttactcttcctgtcttttatgatgatgagaaaaacaaagtagagaaaagctactttaatccacatgatatataaattgaaatcttaaggaaacatagcatcaaagaatgtgtcattacactattcacaataaaaaatgacagcagttgaatttgtctatgagtatctccacatatattgccccacatatattgtgggacataaatttgctgttgcaaggagcaggtgtctagaattatctcattattctaagaaccaaagaaggttatggagacagcactaagtaatctttaaagaaagctcataaatagctaacagataatgcttccatcccccatttccaccaggattagtctaatagtagctgaaactattcaacaagccatggcctcatcaaagacaacctgagatcctttcaaaaaatcccatctctgatactgtgataatgcttttccttccaaaatacttccacttgttcttatccctgacacttccttcctcacattgttttacaccatgaataccgcggaaaaaaggaatataagcagcaaaatttgctatggactttcaatttaaccacaaatctctgcatcctaaccccctacattttttaaggtcagtcttcctcttttcaacatatataatagaaaatgttaaaatgcacatttccaaagaatagtatacataatatttatctattttccaaaataaaatcttaattcagcttctcatacacaacaacatcagtcagaattccattcttgctcttcttgttgaggttgaggggttttcttgattattttcgttgctgatgcttctttgataaaaacacctattttattttttgccttactgcttttaaaattattattttaaaaaacatagtaatttaaaatagtaatttttagtattttaaatactaaatagtatttagtaaaatagtaaaaaatagtaattatttaaaatacatagtaattttatgtatttataggacacagtatgatatttcaatacaatatataatgtatacaatgtgtaataatcaaattagagtaattagcatatccatcacctcaaacgtactatttctttgtgctgggaacattcaaaatcctgtcttctagcaatcaggaaatatgtaaagtaaatggttgttaactatagccaccctacagtgtatagaacactagaacttattcctcctatctagttataatttcatatctgttaaacaacttttcactatctcccccaaacctctacctttctcagcctctagtaaccactattctacctactacttctatgaaataaactattttagctttcccatatgaatgagaacacatatttatcttgctgagcccggttattttacttaatgtcctgcagttccatccatgttgctattaatgacaggatttcatccttttgtggctgaatagtattccaatatgtgtatagcacattttctttatccaagcatcctctgatggacacaggtttattacatgtcttggctactatgaatagtgctgcagtaaacacagaaatgcagatatctcttcaatatatttatatcctttcctttggatatatagttctgtttttagttttctgaggaacatccacactgttttttataatggcttactaatttatatttccaccaacagtgtataaaagtgtccctttctctgcatccttggcagcaattgtataataaattatgtctttttgataattgccatactaaacggggtgagaagatatctcagttggttttggtttgcatttccaatgacattctttacataaatctaaaaaacaattctaaaatttgtatagaaccacacacacagaaaaaaaaaaaaaaaccaaagagccaaataacaatcctgagcaaaaagaggaaagctggaggcatcacactgtctgacttcaaaatacactacacacctatagtaaccaagatagcatgctactggcataaaaacagacacatacaccaatgggactggatagagaacccagaaagaaatccatgtatttacagccaattgattgtcaacaaaatgtccaagaacatacattggagagagggcaccctcttcaataaatgctgtggggaaaactggatatccatgtgcagacaaatgaacctagacccctatctctcaccatatacaaaaaaaatcaacaaaaatagattaaagacataaatgtaaaatcagaaagtatgaaaatattagaagaaaacaggggaaagatttcagagattgttttgcaggaagattttatgatgaagacctcagaagtacaagcaacacaagcaaaaagagaaaaatgggattatttaaacccaaaaaacttctatatagagaaaaaacaatcaatagagtgaagagacaacctgcagagttaaaaaaaatttgcaaattatttattcaacaagatattaatatccagaatatacaaagaactcgacttgatggccaaaaagtaataatctgatttgaaaatgggtaaaggatcaaaatagccatttctcaaaagaagtcatacaaattgtcaagtatatgaaaaaatggttaacatcattcttttaatttctgacaaacataaagtaaatgccaaatttttttatcttaagattgttgttagtataaaatgtgataatgtaaatatcagacatagactctatttctaaatcactagatttttggaacaaactcttcaccattaaactgattatgaggagttataatgtataagtaagagcatttttataaggttaagtaggcttaatttctgcctctgatccttaaatgatgtgttaacttacataagtcacttaacctgtctatatctgtttctttagatgaaaaataaacaaataatatataaaaagaactattttgataactaaacaagtaaacaagtgaaaaaaattgtaactgcattagctcatgttcactatttaataaaatttagtgtgcatgagtgtttgtacatgcatatgtaagttaatagcatattgtaaacatttaattgagccagaaaatatcagcatatgctataggatatttatatttgtattgtatttgttgtataaagatttcatttcagatttcatatatacaaatataaatccgacattttggccccaaactgactcaatacttattttccatttaaattattccaattacaaattcagtacagctaaatcaatactcagctctcaggaatttgtaggccacacattcaaacagaaagaaggcattgtaccttatgtttatttcagaaaaacaaacagctctagttacttcaagagaaattaagttattatagttggaacttaacgttatacaaccaaaaagcggactggagaaggagtagttgaagaaatatttttggctttcaggaaagctggaagaaaacggctctgataacccttgaggacaatcttcatgcaggcaaagtggttgattctcaggagaacaagcagaagcttctggaaaatgcccatgactctccgctaatgcttgctcagcgtttgggcaagtcgactttatacctagagctcattcgcttcagaaccagtgtctctaaattttttatcactaaatattaagggacatggacaatatttttttaaaacctgccctgtaaccctaagattttataactttgtaaaattttgtactttattgccattaaagatcaaaatgtatggaaatagcatgagttacaaagatgcctcagcatgcctgttacattgctgcagtgtcattttccaaaaatattctatttaaactcaagaaaatcgccactgtttctttctaacacctgtcagcaactgctcatagctcactgatgtagctgtttttgcattctgacacgtgaggtctactcacattttgtaagacatgtcactgtcaaaagctaaaaataaaaaggcaaatgtgacagccctggtgccgccatgcctaagagccacaggtaattgtgatcaagaggggtatttttaaatgttgcaaaaatatcaaacttctatttcttccttttaatttttttgtgatttttattgaatttcatcttttactattagccaaaaattgttctatgattgtaaccagtgaaaactacacaagattatttttctcaagaaaaaagactgatatagttttgaaatcttttgttgagaaagctgcactaaattgaaatcacttggcttagctacttctgaggaaaggccagacagcaactgtaatggaggctataaaaatgcataggaagccaagtaattcacaagtgattaatgataatggtaatacagaaaagacctttggtaataaatacataattgagtttagaaaatacaacaaagagtaattagattaaactgagttgtaaacaatgagcatgtaaaaaagataccaaaaataacagattttgatattatgtttgtgatcgtattaccgaaagcataaattgttgcataaatggaaggactggtatgatttaagtacttttgaagcagaaaactcatttagttattttacgagataaagacactcattgtaaatcattcctacatttgtatgagggcaaaataaattgccttgataaaatcaaactgatttaaagtacaattctttaatagcactggatgaatttaaagtgtcttatatcttcgatcaagtctaaaccaaatttctctcacacacggaagtgcacactaacactctcacacacacacatacacacacactctgatacaagtatactcataaaagtaaacctgatgatctctcctcaaagacaaatacacgccctactttcataaataattattttgctttaggcagttataacttgaatccaatttttagtttcacattaatgtgaaatgtcttacaataacaaccagaaaaaataggtctgttacaattgtaataaagatctaaaagaagtctaaattttacacctataatttgatgagaattaaaataataaaaaatatgtttcatatggaaagagatattatagtttctaaagtgaattccagctcatttttgaactctcaatacttttgtgagatatacagtccagtaactgttattgtagggaaaataaagctcagaggcataattgatttgctaaaagtcacaaaactagcaaatgacaaaaacaagccactaaatctgctctgaaggctctagtcgaggacaaatagtctttcccctatttcaggatccttcttgaaaaattcaagctaaaatggaagcaaagaaaataaacatactgtattatatagaaagaaggataattgatattttataatttttaacatagcccattttgtcctattaaccacatactgcaacacatatgttgtagctaaagagttgaagccatgtcacattgttataatgtgcatttattttgtcattcttctgcagtcctgttcctggatcaaggttaagactttgagttgctggtcaaattttcaagtatttttattttttatgatatctaataatatacatggaatatttctcagaattcatcttggtagatttatctgtaatttcatttaacatgggggtctgtttgcctccttatttattccttgtccttcctcatctctgctaggtgtctcaggggcctgaacactagagtttttctgtatccatctcccgtgtcaccttacttttctctgggttatgcctatggcaagcactgactagggattggcgaacaggtgattccaagaagtccggttacttcttcccctcctgttctgtcctaggaggcatgtctggcagacaaagtctctgactccagcctctacctggtgatcctgggctccaggccctagtacgtccttgcagtttatggaagtggaaacttctagcagttgctaattcctgggttgcgttaccttcctttatttgtcagctcagccatctttatagtttaactaataccttgctttacatatccttcatgttagacacagacattctgtttgtgactaatactacccaaaataacataattgtcgtttattaaatgagccagttttggtcatcagagtggagagctggtttgtatatattgcattaatcaaaatgatgtaaaaataaggatcataatattatgatacaataaaataatagcatatatagaatatctttaactgataccactctgcagctctttttcaattgatgtaatttctactgtagacataaaggataagttaaattttaaaatagcacgatttacagaaattccttttttgacaaatgcacactgtactatggttttcaaaatgcaccttttaataatttttttattgcagttacctaaagaaaataaatttcattatataaattattagaaatcaaacagccccccatattcaatagtatttctatgtgatatgaaattaataaaagtgttcaacttttaagttgtttaatattgctatgctctggaagagtcttgtaagctaaaaaatgcacacatttgtgtagcatagacaaaaatttaagtgtgctctcaggctgaatatatattacagaacttagttcaccagagatacattgcattgtggttctgctatatttggatgggtgcatctcttcatttacagccaatagggaagtaaaagctcactgctgctacacaatgaggtaataaacagcataaatagtccatataacttctagttatgcatcatctatccaataacaatccacataatacatgaaaaagtaatattactctttttgaaataaatgtttatacagagacaattatttttttcctttcatgtattgggtgaggttttaatgtctttatatctcaaatttacttgttttaatattcaataataataccctcccttgatttcagcttacacaaatattctttctgaatctctattactcttctttgtcaattccatgcctttgtttagttgctgtttattttactcttttgttctcttctgatttagactaattatatcatttttagcctttttatttttgacattcattttctaacattggaaactgtgctcatcatgttatgccttaaacaagcttgtgtttagatttctcctttgtaagaaattacacattagttctaccaaaatactggtaacatttttacatttttttccttgattccttccacttttctcccaaaagtgggtagctaaaaagtattcttccccataaagactcctacacccatcttttcttcccccgtccctttttttaaagtaaagatgaggtgtcactatgttgtccaggctggtctagaactcttgggtctaaatgatcctcccatcttggcctcccaaaattgctgggattacaggcttgagccatcacacctggcccacacatcttgtcttctccttttgctttgccaccatctaggactcttaacttctcatttttcttctagtgtaaagttgtaactctacactgtactggtatcatgtgattgtattttttaaatgacaataataagaaagtaatgccatggttgtctcttaattgtttgcactggtttccatctgtcatcctttctttcgaagtaatctttctgaaataacttatgattccattccaacttccctccaacattcaccctcagatactttcaatgatttcttgtttcttaaaagataaaatttagtctcatcaatttggcctacaaaatgttttaattaactggccttggctatgtgtttaaaatttttgttactactcattataaatttactaaaaaacattcaatttggctcaaccatttccattcatgcttccttgaatgtggtgaattttgcattataattgctttgctcacatgtttttctctgataggagaggggagtgaagaggaggtacagggaaagggaaaggggaagggaggaatggaggaaagagagaaaggcggttaacatgtgtgagcactttctatttatcaagcactcggaagtgagttaaagaatgagtatttgagcaattttttccctataaaaagctggacattttcatagggaaaaaattataatctagatgtttctaagatatcagtggatgctaacatatttaagaaactaactcagtggagaaaaccgttttctcagaacctttttcaaaaggtgtacagtgcacagataattttatgagcgcttgataagtatgaaagctaaagtatgtcatctgtaaccttgctttttctctcctacacagccttcaccctactctctaattaactatcaggccaatgtttaaagaacaataattctcagagacaccaaaatattagatagcaaagcaggccaatggattttaattgttcccttgttattatatgaaatgctttaaaatacattattttatgtaatacttacgaaacccttagagttagtattccattgttgcatatgggcatagctaagctggtctataattagtgatactgtactgtatacttacaagttgttaaagtggtagatatcaaatggtctcaccacacacacacacacacacacacacacacacacacacaaatggtaactccatgaggtgaaggaaatgttaactagcttgatcattgtattagtcaggggtctctgaagggacaggactaataggataggtttatatatgaaagggagtttattagagtattgagtctcacaatcacaagctgaagtcccacaataggccatctggaagctgaggagcaaggaagcaagtccaagtcccaaaacctgaaaagtaggaaaactgaaagtgcagccttcagtctgtggctgaaagacccagagcttctggcaaatcactggtgttagtgcaggagggcaaagcctaaagaacttgaaagtctgatgttcgaggtcaggaaccatttggcatgggagaaagatgaaggctggaaggctcatccagtctagtcgttctgcgttcttctgcctgctttaatctagccatggtggcagctgattagatggtacccacccacattagggctgggtctgcctcttccagtccactgactcaaatgttaatctcttttggcaacaccctcacagacacacccagcaacaatagtttgcatccttcaatccaaccaagttgacactcaatattaagcatcacaatcgtggtatcattttataatatatacgaatatcaaaacacattgtatacctcaaatatatatatatagtcagttatacctcaaaaaagctggagaaatagaataaaaatgatgaaggcatgttttcaggatcactaagttcagagttgcaagacaacttttcccttcttatacttgatgcttctgaagagttattcaagacttactgactattatttgtgaacttagtgcaacccgtacatgtaacatattcttgcttatcttgttacaagtcttattgtttttcaataaagctattatttctggatttagtcaggatttctccttcatgactcatctaccttctttccttctggacaatttcatataataaaaaatcagatattttcattgtgcaataaggtacattttgctttatacataaatggaatattatatttatacctcattaaatggtagaccattgttgtattttaataaatggagattggtaagaaaattatccagaactaccaaattataagagtttatgcacctgagaaaactcaggcaaatgtctaaagttagcttctataaaacagcactggagttgtttgaaacttagtaaatatcattcagaattctgaaatgaaagaaataattggcaatttctgtcaagtacacaagtttctcccttgaatgaaattatctgtttacagaaccactctaatcaggaagaggccattctgggttacaagacagatgcagtaaagaaataaatgcccccttggtgaaatgaagaagttatggcatttcttcattactagaccagaacaacaaagccaaaggcagtaagagaataaaattgattacagactgtattccccgtgtggaataagggattggatagctgttcattttattttgccactataactaaaactcttctaacttatattttcacttatatttcagtcctaagattttttttttcctttcaatattgtaggcctttctagatacatctgcaggaaaaaaaaattgaccttgaaactaaatcattgtcctaggatttggacattggtggaaaaatggtggagtcttggatgtgtaagtgaagtcttctgggaatgttataaagaaaggtagagctagccaagtttctcttagttcaataataatgcagaaatcaagaatctgtggatgtcttctaatatctattctttgactcagtttttctttagactgagtctcgctctgttgcccaggctggagtgcagtggcacaatcttggctcactgcagcgtccccctcctgggttcaagcggttctcctgcctcagtcttctgagtagctgaaattacaggcgcacgccaccacgcccagctaatttttgtatttttagtagagacggggtttcaccatgttggccaggctggtcttgaactcctgacctagtgatccgcccgcctcggcctcccaaagtgctgggattacaggcgtgagccacggttcccggccctaatatctattcttaaagagttctttgaacgaaactgatttaagagattgccagtacaaggtatcccctaggagatggtagaggactttgtatcacactatgcggagaaaaggtattgtcctttgtgtcaacagagaatacagcaaatatacccgtacattagattactaaaaacagcgctgggatgtttgcagtcccactgcttcctcatggcttcagagaacatcagtgggagatggggccaatgactgcagccatggacaggacacttggaaacagagggaaaaagcaagaatatgaggattccaaagagatacttaatgcctttcccgctcaagttttccacaaataactttgagaattccggcgtaatctcttttcataaataaagatgtaacttttaaaggggtacttggaatagatggattcagagcccaattttattatctatattgtcatttcatatctgtatctatggatctctgtatttgtatatatctatactccaatgagaaaatgtggaaatcatctaaactcatctgttcatttaacaccataacattttaaacacaattttaaatgctgtgaaataatctcatttatgaaattagagaaaaaattataaataaattgtcaaaaataagaatcaatagtctttcagaagagcaatacccatcgagaccatcctggctaacatggtgaaacccagtctctactaaaaatacaaaaaaattagccaggcttggtggcgggaggctgtagtcccagctactcgagaggctgaggcaggagaatggcgtgagcccaggaggcggagcttgcagtgagctgatatcgcaccactgcattccagcctgggcgacagagccagactccatctcaaaaaaaaaaagagaaatatccagaaatactggaattgtttattctaatagtgcccacatggctcaaaaagagaaaatagtataattgacaatataattgaattacagaaaaaaaatttaaaatattgccaatagcaagaaagcttatgtaatacagcagccctttcaaataaaacactaaatatcacagagataaacaaaatctacttagatataatgaacataattttccaaaagatggagcaaatatcttaaattgtaaaaaatatttaaggaatgagagatggatagtcagcattattatgcaatactgacacgagtttctaataaatagaatgagaaaaaattggaataagggtatagttagtattgaaagataaaaaataacttttgtttctaataatacaattatatatctggaaaatctaagaaactgtagaattgtagatgtatcaataagacatatgataataaaaaccagtataaagcgactgatttataattattataatcacatttttcaaagatctatagctttactgtaacaataagattttctaagtgatacagctaaccccttgacaataaaaaggcaaaatctgcaatttgtaagaatagatgtttacaaatctacgatttgtcagaataaataaaattcatatttttttcaaggaagagaaccataaaatcttatttaaagaactaacaactaaacaaatagagcgtcctaacatgaaattaaaatattaacagggctttttctggaagtgaataaaattgattttaattgtattttaaaaagcaattactatatgctgtttagtttggacttttgtgtctctgtctatgagtgaagtcagcctgtactttttcttccctaaatcatcctataatgccatttacaattatgaatcagtaaaaatttaattttttagagaaataatcaatttcatggtttttactcacatatattttaaaagaacatttacttactttataaattatactttcttctaattatgaccctgtttttgttttgttttgtctttcaggtatttttgttgtttttattttgtttcatttgttttgttttttggaaggaggaaggtaataggtaaaccagtgtttgatttagtacttgtttcaaatctccattttctgtttcaattatttctggtctttgttttattatttaattttttctatttttcttctgcttattttggtgttctaattttgaagttatgtttagtttcttactattagacttcattcaaatatttatgaaaatgtcgcatatgttttaaaatgtagcattacatatatttacatttaatttatatttagctcctagcacatatccagaaacatattagtagttaaatggctacctgtgaatatatgaccaagaccttgggaatgtaatagaagtggatttaggttgtaaaaattgtgtaggttttataggtgaaactgcaggaataccatttcatgaataaggcaactttagcatgcattctactgcattactttgaaactgctgacattaaatcaatatttaaaagttagtagtgtttgacagttatttagaaaaaaagttttaattattttgctatataaccaaacatccagatgaatatcccaaaaaagctaaaaaaattgctgttgtcaaaaagtaatcaaaacatatcaaataaattaattccttagtttcagaatggaaattaacatgaaaactaccttgtaaaggtgataaaatctgttttctgacaacatattcaagcacatgttcgatgtgttacttaccagtcagggctaaaaataacagaagctggagaaaataaatccaaaaacatgtctatcaaatagaagctttcatatcaagattggatcagcaagcattcatttctttaagaaattagttgcactaacccattcttcacacctgagtcatttattaaataactctataactaaaacaccttggcatccacaatttattattttactattttaaacaatattttattttttataaacaatatattttggtgtatacttttcttagataggtatttatttttaaattctatgcatgatatctagaaaattgttaactctcatttttttaatttttacatttaacaccatttacaaagacttttcatgtaagaagatttaacttaagccatggtttttgttttattttaaaataattgaccttcatgtacactactgttgattatattctagttaatatcaggaaacactgacaagttaaagatacctgcatgatgtttacctgatgcatggtttgaaatacaaaacaaatgttccctagaatgctgaaaaggagactagaatattctgcagattacaacttgaagaattaataggccgggcgcagtggctcacgcctgtaatcccagcactttgggaggccgaggcgggcagatcacgaggtcaaaagatcgagaccatcctggccaacacggtgaaactccgtctctactaaaaatacaaaaaattagctgggcgtggtggtgggcacctgtagtcccagctactcaggaggctgaggcaggagaatggcgtgaaactgggaggcggagcgtgcagtgagccgagatagcaccactgcagtctggcctggggtgaaagagccagactccatctcaaaaaaaaaaaaaaaaaaagaattataattaaaaattagagatggtagagcaacagagctagatagttaaaccagaaatgaatttaagccaattagatgttgtgatgcacacaattgttacaatgccagaagaaacagcctccaaaataagctttcagaattcccagaacacaaaactcacagacccagtctgccatgaaatcttctgcatctgccatggccaggaaaagctgcaatcacaactgtggcctcacagaccaccttagtattcacatcagcaaaacagatgcagaaaccctagcacttaacacctttgaagataaaatctagccttgaaggtaaaatttaatgagacctaagttaaagctcacgctgacaaacacaaatgtcaccagcatcattgatttcaagagaaaaagcagaagcagcctgcatcaactatgctcattttcccctttcaattctcaggcataaatatatgcttagcagaagttatgtcacaggaaagttttgagagactctggaaaatatatctagctttctaaatgaaattgcactagagcatactaaaggagctttggagacagtggggtaacatgatctttattcccacagtactttgcaaccattggccaattggagtcccccctccccacacacaattttcttctaaattttcaactataaatgaacggtagccatattctccaacctaagataatatgaccatacttaatatgataagactgcttacttccttctctaaataatcattagtcattgaaaccagtttgacaagtgtttatttctcctctatctcagtctaactatcttgtaatcaaagaatggaatattaagttacatattgtactaccaacatgcctcttataaaattacagaggaaaaaatttacacacacatacacacacacagagagagacaacatgttattaaaagagtatgggttaattctatagctttcatttattgaccttgtcatgaaactaactgtatttggtatatgtaattttttaattgttcattgtatgttttcttgtccttcaccaatcccttagcttgtcatggtgcttttactgatgatgtaacctgaaaaattttcaaagaattagaatcctttcaggtcttccctgcatgaggttcatataatcagctactatattttatccctggacatacttacactgtactaggaagctcctaatgaatttcctgtgtttcagatatatttctataccaacattgtataataccaaccatatttttcattggaaatcaggggatcctacaaatgtgtctttaccagtaaattgcctttgccattacccaaagatggctacatgtctctcaaaactattgactcataactgtagccatagcagctgaggaacaatccatatccataaaatatatgcatgatgttatgctttttggtactcacaaaactagggactagacattaaatctctttcacatctgtcacagttaaataaaaccacataaagaagtagtggaagtggggaagggagaaggaagagactttggtcaaaggatacccaatttcagttagataaaaggatataagttcaagagttctcttatataacatagtatgtgtagttaatagcaaacaccatattcttacaaattgctaagaaaatagattttaagtgctctcactacaaaaaaatcgtaagtatgtcaggttatgtatgttaattagctcaattcaccaattttgcagtatatctatatatatatataaaacaacatgttttcaatttttttatttgttgaacttatagaaaacaacagcagcccaatggaagaccagtctgactgttaaaagaaaaacaaacaaatagaaaacagcaacaacaacaaaaaggaccccacaaaaaccccattcagaggtcagcaacctcaaagaatgaaggcagataagcccacaaagatgagaaaggatcaatgcaacaatgcagaaaactcataaggcaatgatgcagaaaactcaaaaagcagcaatgtagaaaactcgaagagctcccccaaatgactgcaacacctctccagcaagggcataaaaccaagctgaggctgaaatggctgaattgacaaaagtaggctccataatatgagtaataatgaactttgctgagctaaaggaacatgttgtaacccaatgaaaagaagctaaaaatcatgataaacaataggggaactgatagccaaaatagccagtttagagagaaacccagctgagctattagagctgaaaaaacacaacaaaagaacttcacaatgcaatcacaagtatcaatagcagaataaaccaagtggaagaaagaaactgagtttgaagactatctttctgaaataagactggcagacaaaaatagagaaaaaagaatgaaaaggaatgaacaaaacttccaagaaatatgggactatgtaaagagaccaaacctacgactgattggggtacctgaaagagatggggagaatggaaccaattggaaaatatacttcaggataccatccaggagaacttccccaacctagcaagactggccaacattcaaattcagaaactgctgagaacccccagtaagatactccacaaaaacatcaaccccaagacacacaattattagattctccaaagtcaaaatgacagaaaaaacaaaaacaaaaaaaacattaagggcagccagagagaaagaccaggtcacctacaaagggaagcccatcagactcacagcagacctctcagcagaaaccctgcaagccagaaaagattgggggccaatattcgacattcttaaagaaaagaatttccaatccagaatttcatatccagccaaaccgagcttcataagcaagagagaaataatatccttttcagacaagcaaatcctgagggaattcatcaccaccaggcctgccttgcaagagctctgaaggaaggactaaatatggaaaggataaaccattacgagccactaaaaaagcacactgaagtacacagatcagtgaaactatgaagcatccatataaccagctagcatcatgatgacaggatcaaatcacacagatcaacattacccttaaatgtaagtgggtaaatgccccaattaaaagacacaaatggcaagctggataaagagtcaagatccattggtgtgctgtctttaggagacccatctcacatgcaaagacacacataggctcaaaatggagggatagcgaaaatttaccaagcaaatagaaaacagaagaaaagcagggtttgcaatcctagtttctgacaatcagactttaaagacaaagcccacatgattgtctcaatagatgcagaaaaagccttggagaaaattcaacatcccttcatgttaaaaactctcaataaactaggtattaaagatacataacttaaaataataagagccatatatgacaaacccacaggcaatatcatactgaatggcaaaagctggaagcatttcccttgaaaagcagcacaagacaaggatgacttctcccaccactcttattcaacatagaattggaaattctggatggggtaatcaggcaaaagaaagaaataaagcgtattcagatagaaagagaggaagtcaaattatctttgtttgcagacaacatgatcctatatctagaaaatttcaaagtctcagccctaaagcttcttcaactgataagcagctttagcaaagtctcaggttagaaaatcaatgtgcaaaaaacaaatcatgaatgaactcccattcacaattgttgcaaaaagaataaatacctacaaatacagctaacaacaaaagtgaaggacctcttcaatgagatctacaaaccactgcttaaagaaatcagagaaaatagaaacaaatgagaaacattacatgctcatggataggaagaataaatattgtgaacatggccatacagtccaaagcaatttatagattcaatgctattctcattaagttgccattgacattcttcacagaattagaaagagtattttaaaattcatgtggaatcaaaaaagagcccacatagcaaagaaaatcctaagcaaaaagaacaaagctagaggcatcatgctgcccaacttcaaacagtactacaaggctgcagtaaccaaaacagcatgatactggtacaaaaacagacatataaaccaatggaacactatagagaattcagaaataaggctgcacacctaaaaccatctgatctttgacagacctggccaaaacaagctatggggaatggattccctatttaataaatgatgttgggacaactggttagtcatatgcagaaaattgaaattggaccccttcatagcatagacaaaaattaactcaagatggattaaagacttaaatgtaatacctaaaactaggaaaaccctagaagaaaatctgggcaataccattcaggacataggcatgggcaaaaatttcattatgaaaatgtaaaagcaattgcagcgaaagcaaaaatagataaatgagatctaatgaaactaaagaacttctgcacagcataagaaactatcatcagagtgaatgacatcctgcagagtgggagaaaattttttgcaatctatccatctgacaaagatctaatatccagagtctacaaggaacttaagcaaatttaaagaaaaaaaactcattaaaaagtgggcaaaggacatgaacagacacttctcaaaagaagacatacatgtggctaatgaacatatataaaaagcttaacatcactgatcattagagaaatgcaaatcaaaaccacagtgaggtaccatctcacaccagtccgaatggtgagtattaaaaagtcaagaaacaacagatgcaggtgaggctgtggagaaataggaacacttttacactgttggtgggaatataaattagtgcaaccgttgtgttagacagtgtggcaattcctcctagacctagaacagaaatatcatttgatgcagtaatgccataactgggtgtatacccaaaggaacataaagtgtagtattatattatatttatattataaagatgcatgcacatgtatacttattgcagcactattcacaatacaaaagatacagaatcaacctaagtgcccaaagtgcggtataaatacaccatggaacataatgcagccattaaaaggaataagatcatgtcctttgcgggaacatggatggagttgtaggccattatcttcagcaaactaatgcaggaacagaaaaccaaacaccgcatgttctcacttataagtgggagctgaatgatgagaatgcttggacacagagaggagaacaacacacagtgggtctcgttgaaggggaggcgtgggggaaggaagagcatcagggagaatagctaatggactctgggcttaatacctaggcgatgggataatttgtgcagcaaaccaacatggcacacatttacctatgtaacaaatctgcacatcctgtacatgtatccctgaacttaaaataaaattgaagaaaaaagagaagccttggaagtagaagaatcatagtctccaactaagcttgtttaattaatgtcacttttcaaaccccatgcatgtatgaatgtatggtataatattaaagaaaccaagcagtaatgaaggctaagaaatgtcattcctagcacttcctccagaaaatatggagtagacacaccacaaagggttggaaaaaaacaaggaatgagaattaggaggacaaacaaagtcttctatggtgaatgagtaaagaaaaacaaaatttcaaaagtcgctcaaatcataaagttctaagaagaaaagatgaaaacatgagtgtagcagagactgctagttttagcccaatatccattcatttttgccagtgaaactctgtgaattttagatggacttgtgaccacctttcgggatactgtattttttgaattgcctcaaaggacaatgtgaccatgtgactgtattttggtcaacagtagagggatagaatatgttattgcaaagaggcttttcttcaccttctcgcaggctggaacatgaacacagagaggtgatccagatttgatcacctgaatgaagacaacagcaaggaaatggtaggataataaataaggagaaatctagctttatggacaacttcataaagctgaccctggaacattgactacctctgaacttacatgagggagagaaatgtttatcttttataaacctattacttttttgatttctacattaaagaaacttagtctatcctaagtaaagcaagaaatattctgtaaatcactttggagaagaatttccaaaaggaaaggtaatctacaatgtcaaattctacaaaatgtatattaagataataatcacaatatatccattgcacatggcaatcaacaaataataactaataatgttataaaatgaagccgaaattgactgatgtatgaaaaattcacatgagcagcaattgacgagtgcacaggaagtgtgaattccagattctctgggctgatctgtccattcttgtaggtcatttctaggcataggagaactcggttgtgacaggggtctgttttttaaaaaatggctcaaattacttttagttataattttattgtctgttatattaatagcaagatatatactctacatatacaacctgtttctttatttacataagcttctttttaaaaatagaagaataagaggttatcttcactttcatcaccttgactagaaccatccaagcaggtaatcgtactttcatataaaacagttttgggccatgcccagtggctcacacgtgtaatctcagcactatggggggctgagaggcaggtggatcacttgagcccaagagttctaaaccagcctgggcaacatagtctctacaaaaaatacaaaaattaactgggtgtggtggcacatgcctgtagtcccagctacttggaagtccaaagtaggaggatgcttgagcccaggagctcaaggttgctgtgagctgtgatcacaccactgcactccagcctgggtgacagagggagaccctgactaaaaaataataataataacagctttgaactctaataataataacagctttgaattccaatagatgtggcatttaatcctctgtcacttaatagtgctatgaaactggtgaaaatacttctgtgtctacatgtgtaaagtgccaatagcaatagtgaaatcatatcattgtaataaattcaataattaataataaaattgaataatttattaagttattcacacatgaataataatacatacacctggaaatatgtaagcaattagcaaagtacttggtctttgataagtttttaaattattatgtttgtaattataatcatggttacaaacagcacaatcatcatgagaatgactgatatgcatgtttcaaaatgttctaaataagaattttaggtgagactacaaatatgttactaagctgctatttactcagtatcttaccatttgtgcaataatagatcctaaaaattagagggtcaatcctatatttcaatactattgaagatttctcccattaatattcaaaatttgataacattatgtaggacagatgtaaacatattcatgatgaagttttgtctgaatcgatttttactgatgattcaacatcaaaatagttttaggagctatttcactgcaccaaagtgattttattgttctataatcaaagctataattgtagactcacggaattctaaatggttcgcaatgtatttcacgtgaatgaatcgtgaaggtctgtttctcaaggcatggggatgtgatttttgggattgtgtttgtttactgtagtgaccatgtgttaactgtcatttggcaggcacagacctaagttccatttttattttattttcatgacaaacctatgaaaacacattgttttacattagaaaacttagaatgttgaggttattctaagatttcaatgagttcaatgttggcatctagggcatgtactcttgccacttatgttttattacctctctgaatagttgtgtcttaattgatgtactctgttgccatttacattaatcccatgactcaatggtgagcagaatgagaaaagactagaaaaatcaactcatcattccttttaagaaatttgttaactgttttatttatttttgttaagctcctgtggttggacagtacaattagttacttaatattttattttctcctctacaaaattaatctttttaataactaccctcttttgactagttacttctattcccaaaacaaaatgtattcactaagttcctatgttcttgtcaaagaaaacgtcagacgtttctgaagaagtgattggggaatcagggtgggaggaaaaacgtattcctgacagtataagaaatatgtttgcattccagtaaattatttttaggtatattttgatatcactttgttctgtaacctacttttatctttttctagccaagaacacactgatgccaaaatattattataagtcgaaccatattctaatttaacttttttgaaaaaaaatgataatatatgcaaaatgagacttagagttgtcttaacatcactgatttttggaattctaatagtcgtgaataagagacattcatgtcatttgataaaataattaaagtataaatttaaggtataacaattaaagtatgaatttaagccagtattatattccataatcctgaaaatatattggttacctcataatggcataatgtttatttccagtagtggctagcaaaaggctattcactgaccaaaactaaatgtttaaacagaaaacatacatttgctaaagactttttagtactaattgttgtaataagttgcattatatacttcctcctaatatgttaaccattattcatagaaggaatttataagaatggataatagttaaaggggcaaataaatgacacttttttatagaagaaacatatacatttaaatccacatatttatactatatagtgtaaattttcccagtgaaaattatgtatctatgggtgttttgttatgtatgttttattcaatgtaacattaaagttattgccccccaaaatccttcaaaacggttagagtttcaatggtatgggaaaagtaatgaaaacattattttcattattgttacattgctgtcattgttactactaaaaacagcatctataaaataaaatatggtgttcctgtaggcttgccatgttccaagctttctctctttttctgtactcaggtggggccccaaattctctggaaccatattatacattactgttttgcagaggtttgcaagttcttaagaacttcagagaaagccatttggggaaaaagaggcatttcaaataagtgggactccagctttcctattcttatagttatgtgctgaaccggactggaattgaagtctgctccaaaatattgtaaaagaccatgcttattaaagggatcttactgccaaagaaaaagtagttcagaaagctaagaaagctaaagttcaggttttaacatcataaaaattaaatggtatatgttactaggtggtacagttatatttctaaactcattgtctaattattttctatctaaggatgccagatgataaatatatctatactgttctattttatgaatataaaatgattttataaaattagaaaaatccaaaatttgacctgagagttacattgtttcttaattataatgtataactttcaatacaaataatttttaattaaaaacttcctacttattttcagtagaaatgagcaaaataccagagccatgtgtggctaaagaactttctttttattcttttggtagtttattttttctaggtatcctaatgtcagttgatttttaggttagatagtactatgtgtcaaacacatttcttctttattttcaacatgtatttacactatattttctagccttctatgcagttaaatgtggctggctttatgtttgagttctagttcagtgaataaagagaacactttttcgaggcttctatctttgaaatatttctcatctgattgctaatatctttattttaccatgttaatgcattaacaaatgatgtatttgaaagatgaatggtaaagatgaagacccaaaatggccccaaatcatcacttgcagaagacttgtagaaatcagcctaaaaccactgagtggcagctagtgtatgttaatccttaactaagttagaaacatgttccttgaagtaagatcctgccattaaaagtgggcaggtgcatacctaaatgataagaacataaataacccatccaactagtaagtgagtgcaaattgatattagatgctaaaaatgggaaaaaccggccaggcgtggtggctcacacctgtaattccagcactttgggaggtcaaggagggtggatcacaaggtcaagagatcgagaccatcctggccaacatggtgaaatcccatctgtactaaaaatacaaaaattagccaggtgtggtggcacatgcctgtaatctcagctactcaggagactgaggcaggagaatcgcttgaacctgggaggcggaggttgcagtgagctgggattttgccactgcactccagtctggcaacagagtaagactctgtccaaaaaaaaaaacaaaacgtgaaaacacttattatgcagcagcaaaatgccacataactactgagcctgtagctctggagcaggtgcgcaggtggatgaaaggggttgatgtgcaatgtgtgtgttggtgtttatttatttatttttattagaaagctatagcaagaaaaagagaatcccagatctacggagatttacctgatcttctggtttcagtaaaacacagaaaatcttctcttcaaaaaaaaggaacatgggaaaacaaaagtaataaaatggaggaggatttccattttcaccaatggcaaaattcagattcactcattttattatttctggaattagaatgcacctattaatttctactggccatatggcaacagtgaaatggctattgctacccatttatacacatataaacttgcagattcggttctgtggcctgaatttgcagaagacatgatttgaacattcttaaaacatgctatgtcaccgacacttttgatgacgcagatcccaatattgcatgaaagaacatggagataaaaaattgacttgaaattcagaagagtcagtttctaattttgaattagtctcaggaataatttaaccaatttactttactcatatattctttttattatgcacaagtattatgttttatgtaaatttgtatctaaataagtcaaacataattctttcaagaaacataaaataaaataagttataagaaagcataagtcatgcattttttccttagtagtacataaaataatagtgtcttaaagcagatgatattttttattctaaggatgcaataaatgctaggaagaactttaggtatagttattggcacattaaattaaataaaataatacagatcagaagaagggcaaatttatagggaataacattcccatcaaaacaatgtacccaagataataaacatttcactctttaaggcttaaaatatctctttttacttctaaatttgccacaaaacataaaagaggatgtgaatgttgtactatccaaatggggcatcgctgcaactctaaacacatgtataaatatgaaattactagccaaagaggaaactgtccaggggtgtctgaaaacaagggaccacgtagtatttcccagagagtaataatagggttaattacaggactttgtccacttgcagggctgagaaaactttccatgttgacttgtcaggatattatgatttctctgaatcactgattactatatgccttcttctcttcccattctttggggataggtatcctgtcctcaaattagttttgtatatttattgagagaagataaaacttgacagacttcaaaggacaatggttcatgaatattacatcttaatggagagaactgaggattacctaggataatagactctgcttggtaagatgttgggtcctctgtgttagtgataattgctgaatggctctacgtatgagaagaaggttggcataaataattagaaaagagggagtgtggcagaggtttctttgagttcacaaaacatttttttcttggacacagatctggactacatctttaagttcttttgtagttggccatgtgacagtttttgccagtggggtatgtgcagagggtgtatgtcatcttcaggcctagaccattaccatttctgtaaattgttctccatgttttctcctttctatacaattaatgcaggaaaacatgccgagtttggagggtatctatagaaatttgcaaaatcctaagttcaaaggtgcctaggtcattacatcatagcttacaggaaagttacacgttgatcagaaacactcattttaaataaattaaaagaacagatcctactatgtgaagccagtgaggttgaatttttttctcttataacaatgttttatcttaagagattcagtcttcattataataatccagaatatctattccttgaagcagacacgaaatctctgatggcaaacaaacttatgtcccctttgtctattatcagaaaacaatccaattagaaatcagacaaaggatttaaacaaacacttcatcaaaatagatgtagggatagttctatgattcaaataatggtgttccccccaaaattcctgttgaagttttaactctgatataacattattaaaaatgtggcctttgggaagtcattaaggcataaggattctgccctcatgaatgaaattagtacccatataaaaggtagcaattgttgttgaggatgtggaaaaactgcatgcttcatacatggctggccagattgtaaaatggttcaatcactctggaaattagtcttaaactttcttaaactgttacacttactcagcaattgaaactgcctttgcaaattcattacagtacaaaatctgacatagttgtgaagcctgaacatctgagacagttctcagttaatttagaaagtttattttgccaaggttgaggacgtacacctgagacacagcctcaggagctcctgacgacatgtgaccaaggtggtcagaggatggcttggtttcacacattttagggagacgggagacgtcaatcaacatatgttagatgaacattggttaggtccggaaaggtgggacaacttgaagcaaaggcggaacaacgcaaatcggggaggagactcccaagtcattggtatataagagacaaatgattgcgttcttttgagtttcagattagcctctccaaatcagatatgcattcatctcagtgagcagaggggtgactttgaatagaatgggaggcagatttgccttaaacagttcccagcttgacttttccctttagcttagtgattttagggccctgagatttattttcctttcgcatagttaactccatcttgcttccaacctccaagctgttgttggccactcttgagcataggcaaatttatctttgggaggaatttactttatagtttaatttgaaagcaaggatgataataatccatctctatagctgatcctctccttgtttggggactgaaacggcctttgtaagattaatgaaaggccacaagaatgggattatgggagtggtttgaactctaccaagacatagtttctgcacactttttctgctcaggagttacgtggccagaggtcaaagatgggcatagattttgtaatttattacctttcatggggtatgtggccagaggtcaaagatgtgtgcctttcccatttgttcctatagataacatcactattgaggaacctaacatgagtttatttgagatgattttcaggctaacctcagcatgacttgtgactcatgactcaactgatcctgtggtcccaaccagaagtggacccaggacacaaggaccattttccatacccctgtgatttcatccccaatcaatcagcagtacacattccctagccccatgcccaccaaactgtccataaaaccctaacttccaagcagtctgagaaaataatttgagtgataactccagttcttggacatataccaggacttaagtgaattaaactctttctctactgcaatgccatggtgaggtaatatgggaaagaaagaaaaagtacaatcattatatcatcatactcttcctttggcaggaattgcatagttataccagcattcttctcacctcttccctactccctcttccccttatcaactcatgttgagtctgaatacgtacttgtgaaggcgtgtaaaccggccctttatgcttttacagccccttgtttcagacaaccaatgttctaattgcccattttacctgtctatcaaatcattactctgagaaaaatatcactttgtctattactgtacattattggctgaaccatatgttgcttggtctgaagaaatgatcattggcctctggctatccaaattcatgtaacgtttagtgttctctctctttttttttttttaatggcactctgagcattttcatcaaccagtaggtaagcaaagtccagtgcagaatcaatgtctgttcctgtcaagacccataggtaacctcccagggacaccagcattagtcttacttgccagctaagttacttgccagtattagtcttacttgccagctatgttcaggatatccctgctaggaaatctattccacagttatgtgcagtctctgactctcttgctgatgaacagaacagttcttactggcatttggagccttagagggtacaagaagaacacatccagattcagcccatctctgcattgctgtagtacccccatatgcacttatttcatggatctaggtagtcacttcaaagaagcacatgaggatatctgcttatcaatttgaattaccttccaaacctggaaggaggctgctctgatggcatggaaatgtcctactctaatctgccactccaagttccatgaagccatgccccatacatttaataggccgggtttccattgtcctcccctctgactgtgttgataagccattgaccaccactcatgagtcagtaaaaacccaaacacaggggcatttgtcactgttcaattctttagcatgctattcagcccaccaagctgacttgtttttacttttttatttttttcatcaatgtgtcatcctttgaaacagaatgttgtttatttactttggaactgtcttctacacactaagcagttctttgccagtcaggtgagaggtatttataggacactgtgcaagtgatgatagaatccagcaactcctcatgaagctctaaaatgtgctctggagaaaaagaagctttctgttacttaacatctctcctttgcattccccaggtagcatgctcctgtgtaaaccattttttattttactctaaaactccttgggcatttctatcctcattagagcatttctctgacgttacccaagacatcataaaaatttccagtttcattatttaatatgtttcagtcctaggggtagcttcagcgatgttaagaaaagaccatgagatctgcaagaaaaagagagagctttacttgctttaaaaaattacctgtagattggggaaatgcagcctgtggtataaaagaaaaatatgctcctaagaacaaatagagagtttggcttaaaatgaagaagtttctgtttaggttctcagtcagttttattatggaaatgaagtattcaacttggtctgttctaagttgttgaaacagtccaactctgattgggtggtttccaagtccaaaaccagaagcctttgtcagatgttttcttttaaatggttgttggggagcttcgtagcaatttattttggctctggttgcaggaactgtttcagctcagaggtgtaaaacagaatgtttgtctgagaacctacagcgcctggccactctttctgactgtgctatggcgtctggttctacttctaaatttagagcatctctattagccacagggagtccatctcatccggagagtctggggtcttaatctagagttttattttataatagcaaggtagtaaatttacctcaagtggaaattctctagttcaaaatcccggtagtcatcactaggaggaactcacaggcttttgacataagatgcagtttacatttcacatagggctatcaaacagaaaatttgtttatgccagcactccagtttctattttacgctctctgagcttgggcaatcttactggttcccatttagcacattcaattaatacagcttgaatggtggatttacatgccttttattttatggtactagctaggtagggaaaatattccccagtcagacataatattcattcccataaagcatttaggtaagtgagatacaacttctctatttaaagcctgtttaacattctaactttcataatcctattgatagggacgggggcagggaaattctaggcaaaaaacggcaggaacccagcaaaaacccaccccgaagccgaaaagtctgaaactggcccaaagtgggaatttatatccctgttctcctgctggaatgttgtcttttcctaaaccacccatggtcccgccctacaccatcctgtacctatacaaaccccagactcagccagtagacaggactatggttggacattggagagaagcagcttgatggcttaacaccgaagaagaatccagccagagacagccagacttccggggagggttacctaccgaccctgtctccttctcagctccccttcctgccgagagccactttcattcacaataaaatcccccacatccaccacccttcaatttattcgtgcaacctcatttttcctggctgttggacaagagcgcgggagccacaggtggagatacaaaaagctgtcacattggccctttgcccttgctggcggagggcagccgcctcacacagaggcagagggcccactgaactgttaacacttaagccatctgcagatggcagagcaaaaacagcactgtaacatgccctctggggcttcgggagttgcaggcacccacacctggatgctacagtggagcctgaatgtcgtttgcttctgccagtgccccaaagcaacagctccaattcctgcacccactcgcctgcgcgctccctcagtggaggggtggaatgcagcaggtccaagttaatggagtttgatgccgctggtgctgaggcagctggctgcttccactgctggtttactccggttcccgcacttgtttgctagcaagcttcctccggggagctgttgagggcagagtgtgagtagaggaggcacccctgttgagagtcctgcctaggagtcagggaaacatactgctttactataaacccgggagctgttgagggcagagtgtgagtgtgagtagaggaggcacccctgttgagagtcctgcctaggagtcagggaaacatactgctttactataaacccttacgtttttttgtattctagtcccaggaacttcttcatcctcaggccattttacccattcttgtgaaaaaggctttggttgagataaaggacactggcctgtttatcaatctttatcttgattaatttgcctgactattgccccaggcaatttcagatcggatttctcatcataatctctgccttctgactctttaaatttctccaaactggggtaaacatagcaaaactttttggaaccccttaatgttggggaaccagcagggactccctttggtccaccaaacctttgatagtattgtgttaagacttttgttttaacaccataaacacaattttatttcacttatctcattttaaaataagaatctaaagatttccagtcctggctgggcacggtggctcacgcttgtaatcccagcactttgggagaccgaggcgggcggatcacgaggtcaggagatcgagaccatcctggctaacaaggtgaaacctcgtctctacttaaaaaatacaaaaaattagccgggcgtggtggcgggcgcctgttgtcccagctacttgggaggctgaggcaggagaatggcgtgaacccgggaggcggagcttgcagtgagccgagatcgcgccactgcactccagcctgggcggcagagcgagaatctgactcaaaaaaaaaaaaaaaaaaaaaaaaaaaaaaaaaaaaaaaaaaaaaagatttccagtcccatgactttccctttttttcaattagtcttttttgttgttgttgttcagatctccacgtttattcagatttgtatgtggaatttaaatgtgttatgtattttttgtacaaatgcatgctagcatccatagaacaaatgtcttttttttgatatctgatcaactttttttatttatttattttaattatactttaagttctggagtacatgtgcagaacgtgcaggtttgttacataggtatacacgtgccatggtggtttgctgcacccaccaacccgtcatctacattaggtatttctcctaatgcgatgttcccctccctatgtccatgtgttctcattgttcacctcccacttatgagtgagaacatgcggtgattggttttctgttcctgtgttagtttgctgagaatgatggtttccaccttcatccacgtccctgcaaaggacatgaactcatgtttttttttttacttttattaatttcttctttatacgccttatgtcttcataattgtttaataatttccaccttctagaataaatcctttgactttccctttggcctttctccactctcttgttaatcactctaatgttttcagcagcatctgtaagatccatgagggaaatctgaaacaacaaatctgacaaggcttcctaaactatccttctgttttgcaacagcaagattaaatgaggcatccatgttaaaggggcaaccttaatcacagcatttgccataaaaggcgtattcagcaggtgaatattttggtcaccataaattcagtcccacatagcttgcatgtgaaacgtatcagctaattcatctaaggcgttccacttggcatttacacagggagtcaaaaaatctcccttctcctggtaaacagatgttctagtggctttttttttttcagtccactaggctggtaactccctcaagaataacctctatgtgtctggattgtgtgtaactatatttgattgttccatggtgagcagtggggtttgcatcaacccaaacatgctctttcaactctgcagcctataaaaccaaaagcactgctcctaaattagattgtctcacaatcaattttagtaaatgttcctgaggaagctgatgaaatatatctacaaaataaaacaatttcttcatgctataccctctggtttcaatatactactcccctaaaaaaaacagggttccttcacttagtgagtaacagatgactctccatgagaagacaggttttgatcaatagggattttattacttggaacaggtaaggaggacactgaaagtattattcaattcaaggcgctgtgtctctgagagaaagtgacagaagggttttatggggtgatggagaggagggagggtgaatcattgcatgtagagaagaggtcccagtgtcgaagatgtggtgagtcgttatgccagcacgtaggtcagatgttataataatgaagcccccgtccctcccagggtggagattttagcatggtaatgaggaaagtttatgtgggttaatctataaattgctggaatccgtcaggagccggtttgaaccaactaggtgaccacattccacacagggttttgaaaaagcaagactgcaaagcaggaggctgtagaacaggctgattgctcaaggttattaaattcctgtaccctggagaccctccctgtctgcttaaaaaaatgtttcttggttttgtcctttactcacattgactattttcttgataaccacaggttctagaagtacttgcttttgtccctgcataaatttgccctcggggaattttgccgaagttcagactggctgaaatatgagctcggtatagcatcaagttttgacccagcactctcttttaacttcattttagctattgcagaaaacaataacaaagaggctgaatatttcactgttttcttattagtttgcatttccctatgtgcccagtgaaccagctctgtgggagtttgatccatcactaaattccatggtaacttttacctttagtaacttcttgtagcacaactgtggctccataccatggctggccagatagtccacgaagtaccaaaggttttctcctgccctacccactcatcctttctcttgccgagccacagttttctgtgagccagggccattttaacaacttctgattcactgataccaattttgaatttgtgaacacccaaagtgttgtatcactcttagaatttgttcagtaactaaatgagaaaaaacaaatgttttgttaaaataaggagagcatgattagcataaagtttcatgtgtctatctaggagtaaacaacgtagagtagtaatgatcataaacgaataaggtgaatgaaaatatgattttcttttcattggcaaataaataaatttagaatgatacatgtgaaagtcagaaaaatgttcattagtattgacaagaagggcaattaatttgaaagagggaaatataactagtttatttgtgtttttaaatctgttatgtctttaaaaataaaagaccatgcaaaaataaagcatttgttttggaaaggcagtcaatttaaccacaaagattaaatggggttgtataataatcaattgaattaaaaaattcttgtgtctacaatactaagcttcatcatagaaagataatacataactactctgatttcaaaagaaagtgatatgactatgagatgcagttgttaagaccatttggattgaaaattcttcttcaaagtgtcaagtcagtcacattatctatttcctaggagcccatgtggaaatcatagaaaacagacatttggatttgggattccacgtatcccccagcttttgacctcctggttccaagctactacttttattatggcacccatatggactacaaaagtgtactagacagacaggctttctatatttggtttttacattgtctgggttccatctctgtgaatctctggtctcattatacctcatgggctttttttcttctattgactaaagatttttctgttgttgtttatttttcagggttgttatgtccctccattgcctctcagctgttactacttttcttttagtatcttccttggcctagcctatagttagagttagtcacactgtagaatattttaaaaatgaaaataaagaaatacaaaaaataaaaataaaaatttctactacttggaaaatgtatcttgagcacatttaaattaaattcaattagaattttaaatacaattttattaatttagattaattatattaaatcaaattaataaaatgtgttaaaattaaaagtttttaaaatattaatctatatttattatatttcagttaaatatattctatttatctaaatagatccaactgggtctactctatccatatgggactagaatccatcatcctaaccgttttgctatggttcctctccaaacatacatatataggttatcctttgtatatgctccatatattacatcatgcatgtattcattatgcccaaatatggaaaagaaatggttatactgacagagactaattattttgaactgcattgataaaaatatattaacaagaagaaaagctgtagatgaaaacagaatactggtcaaattcttcctggaatcaagtctcaatctttgaccctcacatagtgaaaagaaatgtactgaaagctgggtaatcaggattgagaggactttctttgtatttactagtttctttgcctggaatatttttccacagctaactcgatgcctggctccttccgtgctgtttttttttttattattttttattattttattttattttgagactgagactcgctcttgtcctccaggctggagtgcgatggcgtgatctctgctcactgcaacctccgcctccctggttcaggtgattcccctgcgtcagcctcctgagtagctgagatttcaggggccaccaccacacctggccaaattttttgtatttttagtagagacagggtttcaccatgttggccaggctggtcttgaactcctgacctcaggggatctgcccacctcggcctcccaaagtgctgggattacaagcttaagccaccacccccggccaaccttcacgttttagatacgctctcctgatctaaagcagtcgtgatccaaagcatcccgtgtcctgctctggcttcattgttctctattcagagcctcggttatgtgcttcagagaacttactagcattttcagcaacagtatttctttgtttctttgtgctctatcactatcagaagaatgtacattcattaggtgaggaatcacatctatcttgtttacggttgtatcccagaacataacatgagttgtttttttttttttaaaaaagcattactaaatgtttttttttaataaaggcacaagaaagtcaaagttaaataaaatatagaaaagaacctctaaatgtaaaatgttttatttcaggaagcaagaattgcaattcaggccatccatgtagaccaggtagttttttgtatgtctgaagaacaaacagaaattcagaggtcttatataaaaagataaatgttatatattattcttcaagaaagttcattggtactagtaaagttttggggagctagtaagttctaactggtaagtgactgtggtgggcaaaactatacttggaattgcagtaggttgtttcagtagctattagataatcaagatttaataaaaatgaaataaatatcaatgccttaatattaatgaatatagagctaatttgtaattattaattaattttatattattaatatagtattttgatgttgaattaattatgatgagtgattacaagtacaaggagaaattttgaccttcattgaacaataattgtgtattgaagtaccttgaaaggcaacttccttaactggaaagaaaaatgcctttaaccacagaagctgtgagaatgaggagatacaaaaacataggcaaggtagtacttaatttctgaatcccaaaatagtactacaattggcaaggtgtggaacctcggacaagttatttaaccttggaatttcaattttatgtctgtaaaatggtaataaaaccattcacatctcacaagttgatgagtgctgtaggtatatcattttgaaatgcattattaagatatcaatattataatgttataatcataacatttaaatggttttcaatcatttaaaagggtgtttatatgaaagctacacaattataatattataatcacaacatttaaatggtttccaatcatttaaaaaggtgtttataccgaagctacacaatcaactagtgggataacaaaaaaataattgggccaggcatgatggctcaagcctgtaatcccagcattttgggaggtcacgttgggaggattacttgagaccaggagtttgagaccagcctgggcaacatagggggatttcctgtccacaaaaaataaaaataaaaacttgccagatgtggtggtgtgcacctgtgatcctagctaattgggatgcacaagtgggaggattgcctaagtctgggaagtccaggctgtagtgacccgtgatcacacccctgcactccagcctgagtgacagagcaagaccctgtgaaaaagaaaaagaaagaatgaaagaaagaacaaaagaaagaaaggaaggaaggaaagaaggaaggaaggaaggagaaaaaagggggaggaggaggaggaaggaggagaaagaattgcacagctggtcgagattttgttcagctctggaatttttgttttgttttgttttgcttttgtttttgttttgagatggaatttcgctcttgttgcccaggctggagtgcagtggcatgatctcagctcattgcaacctacgcctcccgggttcaagtgattctcctgcctcagcctccctagtatctgggattactgtttccaccaccacacctggttaattttttgtatttttagtagacaaggggtttccccatgttagccaagctggtattgaactcctgaccttaattcatgcaaaaagaatagacaaatatgctatgtctgtcgggtgaatatacagtattttatcagatagtacaagaaattaaaagtgaccactgcagcttattatgtctgaagtgcattgtctcttctaaatgcaagttgccttggtggcagattatatctaggcttgtgccaagaagggggaaaaaagaaaacaccaattcatgtttctaacgcagaaattttctgtgatggtattactgaaacaccaggggttcagtgtaggtcctgccacttgctgcatagaaagccaatcactgagacaaaaatcactgccaaggaagaaggctttaacggggtgctgcagccaaggagatgggagttcagtctcaaatctatctccttgaaggactaaaattaggggttcacacagcacggaaaaagtgtaataatttgttagaaaacaagaactagtgtgtgataaggaaacaaaatgtgggatcccagtatctcattgtctggatgcagtgatctcgtgagtttcagaccttgatactttttgagagatctagggggtcgtttcttgaggatgaaactcagataaaataaatgtaagtttcaagctttaagactggaggagtcaatttctatgtttatccaaaagagctgtgtatgggactgttggatcagtttcaaggcttgagctaaaaaaaacctattgaaactcttctgaatcttcctatatgcttcttctggggatgatcattgaaatcaatatatatttcttctaaacaaaagggaaagcacagttcttacttttcaaaatatctttggataaatgtatatagttgaaatgctgtctcacattcactacttcgaattaagaaataacactgcattaagctctaataattaaacaaaacaaaacaaaatatagtgaccatattatctagttacttttcatgaaaataatgtttaaacataacctatttttacatcaagaaattttatctaatatcactttggttctagttttacatttgcctgtgaagatcacaatgcatcatttattcttccagaagctatctgattttgaagtaacaaaatgattttctgagaatccaaatacaaaagcttaagtgtgggtaaaatgtttgcatatatatttgaacatacttgttatgtatgttggtgtactaagacaagggcaaatgtagtttgtttgtattcaaactgcaaaacgtacacaaattaccaagatacccataataaaatacctctttgacttttctgatggtttagtttataataaattttcaatgaaatattttgtaaaaaattaaaatagatatgaaagtagcttgatataaactgaatattgtaaaaagtgtttttgcaattttctgctagtttatatatttaaaaaatttcatattcttaattattgtattttaaagatcacatttctccatacatgaaaatagaaaccaagtgagtgtgtatatgtattcatttagcttttgtatacatatgtacacatatacacatatacagttatatatgtgcatatatacatgtgtgtgtctgtgtgtaacaagataatagattaaatgaagaggaatatggcatactattggttaataagtatatttatattgtgtgtttaataggaagtcttacatataaattctatcttcttaaagatgtcagaataaccattataagtcataaactgtcactttttttacaaagttgttaagatgaaattgaatgcttttgcacaaatatctcagccctgaagagcgttatgttttcaatgagttttaaaaattttttagtcatctttcctatagagctgaagaataagccccagtatcattctgaacggctgttttatggtatttatttaattggtactctaaggaattcagcttttgaacagtgaaattttcactcatgatgtttatttattgaatgccaaatgtatcataaactattccagagacaaagtgattttcctataaaattaatatttaaaatattgaaagctttgataattaattcatcattgtaacttacatatatactttttattaactaaaattttatctctcaactcccaaattataacttgttattcttccatccgttcttctgaaagaaagcacttggtttaacacagctccataaataattttttccaatagtaatctgttcaacatttttaagttgacaaccaaaatattgatgttatagctgccttcactaatatgacttatgattctgtaaaagcctcacttgatttatagaagatacttcaacttccattaaatcttcctttaatgatcctgagttctatcttttttgtaagagcatcacaatttctaaacaaagctaggtacaaatgtctgaggaggccaaccattatttcctcagagttacgggaagatagtttttttttcttttttcaatgtgctgccttttggagcaacaattaatttgatatttgaagttctttggccagaatgttaatgcttcatgcattataaagtgttgcatatttatttctctttaatagataccaaaagaaagtaaatacatttaaataattaaaatttcttgtaagattttttactatggtttaaatgtgtcccccaaagttcatgtattggaaacttaatcctcaatgtaacagtcttcggagctaggacttaataagaggtgattaatgtatgagggctctacccttacaaatagattaatgttatcatgagagtgaattagttatcatataagtaggcttgttataaaagttggacctttcactctgttgctcctttatctttccccatagaatgatgcagcacgaaagccaccaccagatgctggggccatgctcttggacttctcagcctcgagaaccatgagccaaataaaattctattgtttataaactacccaatctcgagtgttgttacagtcatacaaaacagatgaagacattgctgaattgtttttgttttttattctttcctttattttttctcccattacctggtattattattaggctccataattcagtgtagtattgttatatttactaaaaagcatatatttgatcatatgctagctaaaggattctagatatattagaatataaaatttaaaacttttacttttggtgatcaattctatcaaaaaactaataatcatacataattctcatggaaaatatttttcaccaaaaaattcttttgtttcaaattagttctctaatatcaaacatgcatacctaaataatgaacttattttacacctctccattttagtgatttacaaactacataatagaaaataaatcctcacttaatattgtcagtaggttcttagacattgtgactttaagtgaaacaacgtataaaataactacttgtttttcatgagtgttatagaaaatgaagttgaagataaagatgtcctttgaggacatgctgcatattttttctttcaaagtttcagtttccaagaagctatcaatggtgttaaataaagaattgctgtatttaatttaatcagtgctttcctgtgttggaaaggggttttgagacactatttcattccgttcaccctcttgctctctgtacctattttcttggatttctcagtatataacattgtgaataaaactggaataaattaaatgacacctcaataaaaatatttgttccccaaaaactgatatttctgtagaaaatacttgttattttagttacatttttaaaacaaagtgtaaataataacttcctaggtgctggcactcttgatactctttactctgctctgattgttccaaagtgtatatgctatagtcagaatgcttttgtccccatataatttatatcttgaaatcttaatatccaagccaataatattaggaggttggtcttttgggagatgattaggtcatgaatgcagagccctcatgaatggaatcattgcccttataaaataggcccatgcgggcacagtggcatagtgtggacctgtaatccccactactcaggaagctaatatgcaaggattgcttgagaccaggagtaaaccagctggggcaacagagtgagaccatatctcataatgaataaatgaattaatgaatgaataaataaacaggcccaataggcccatttaccctttctatcatgtaaggacatagcgagagaaagcacaacctttgaattaggaaatgggctctcactagaaaccgtgtttgctggcacctgaattttgtgtttgccagtctccacctatgagcaataaatttctatgatactttatatttcagcccagatcaactaagacaacatgtcttctaaaatgctacatataaaatgtacttatttatttgtaaaaattgtattgattggttatctctctagaaagtaagttttatggaagaactttgtaaataaataagtgaataaacaagtaaatgaataagctggttttacacttgttccctgaattatattgtaattttaagtataacttctcttacaattttgtttcatattatacgagtaagtaaaaataatctggaagcatataacttttcaatgaaactttaaacaaaaatattctaaattaagttaactggcaaggatttattataatggatgaaatatattgggatataattggtcaaaaaatataaaaattatgacagttatttaggaataaaaatacatttattaattatacattaaaataaaagaactaaaatagctatataaaaatcttttggaattaatttttactggctcatagtaattctaaatattacttacacaatattttaacagtgaacactcagtgcctattctgtacttttatccctttacatacaataatttcccaaagtgtcatagcaatattaacactagaaaatggctattaatacttgtttatataaaagctaaattttgtaattttagaatgttatagaatgcaacatcttttctaggtgagtttttatgatctttatgattagttaaatcactgccctaacatttacaacagtacagatgcagtttcctcgcttgattctgtttcttactgtgattgaggcaaagggcaaaaatcaaaacctcacattggaagtcaatcaggaaagcaactgtctgctttagctactctgtgactgtaccttgcctttttaaggatacaatagactacgtgttaaaaactaggatgttcctctctggaatgtgtgtggagtgtgtgtgcgtcacatgtgcacacacatgtatgtgtgtgtgatatattagaacaaaagagagattatcttgtccaatttaccctcaatttagatactattttcttggaaacagacaaaataaattactcagcaccaggcctaattagtaaaacaaccagcattacaaatcatctcttcagactcataactcagtgcttctttaccgttacaaaaatattagaatctaaatattttcaatgaatgatgatgttctccgttgctacatgtattcagtttaaagtactatttttcccttttcctacccataataattttgtgtattttattattggaatctcttatgaaatttaaaatttgttgtgaacttaataaaacctagcaaagagtattgaatattcagaagagtgatttccctgcaaactccctaagtgcttctaaaattatactgattaatataatacacatagataaaaagcttctctctcttataaaatgtgtgaaaagttgcatgtataataaataatactatatttaatttcctaagtaatgagttcacaatgtaattccttacttaaaaatttgaaatgatgaggatgaatatgtcaaagattattaccaacagaacaatatttgttcatcaacttagacggcagtagaaatgatgataattttgaaatagggccaaggcactagctcatgctctgtaagcatacttgtactaataggctgaagaccagtgttaaagttatcttttagaatagtaaaatagcatatgaaagatactgcagtggcaaaatatgaagttggaagttgacttgaatctgcaagagtggacctcaagaggttgtttctgggtgaaagtagagaataagtaatagaaatatttgagaatcattaaattggtagaactgttttattcactgtcataatgggtttggagtagaggaagttaaaaaggtgctacagggtgcaagtaggtcttcatgcttgcaggatgcaggcagagagagacaagaagtgagtaagacaaaagaatatcaaaccattttctaagcatggccattcagcctgtcagatctaagacagaggacagatgtgtaagacaagaaacatggttttcatttataatacatgtttcagatttaaaattattattaactgctataactaaaataaaaacaaaacactcaaagtaataaggtagtaattatattcatagataaatataatgcagtggaataattgtttgcaaattaaattaaataatgagaacaaagaaaaatatttctttttaaattaaaataataatgtttaatttacaagagcagaatttgaagtcccaatatttgatttgagataatctgagaagccattttataaatacacaaatgaaatttctgaaacatttgctggaaacatagatattacaattatcaaatccaatctgtaccttgaatatttagaactactgtaaggttgacatccatttagcaaatgaagtagacataaatatttcataacagatttaaatttaaaacaaattttaaaggataagacaattaaaaattgtgctaatgacatatcagatgagccataaaataataaaagaatagcaaattcaacaaaataaaatctcactactaaatacatgaataaatctgcttaccagtcgtctatttacattagataatagtttatattttgtacatgcatgtaatttatataaagcagatttgtagttattcattttaactatttgaaagctttctatgaacatattttatggcggacattttcactcatatgatattactgagacctgatggaatcaaagttttaaaaagatatataacatttgttgtacataacaaatttagttatatctaataagtatcatgtcttgggaattaaaactttaagcatatgtttagtaaaatctgatatagttaaacagtctacctatttacataaaatacttcaatgttaaaacctcaggtttagttttaataataaatactcaaacaccattgtttctttccagttgcccttttttgaattgtatattgcctcacttcttattttttcctctcttgtctcatgaaaaatattattttgaagtaaagaccctgtgtttaaaatagcagttaattgaaaatgaaaataagaaatacacattaaagaaaaaaaactttgttatagaacgctcttgttaatgcataaggatgttatccattttttttctcctgtttggttcctcctcggttaggaataactaggtgtttaggaagcaatcttaggtaatgaaaacaattaattacctttttgtagtgtttttatattttaacaagcaaggactagtaattatcttgctaagggaaaaattgattattcctttatttatagaatagtctctcatccctcataaaatgatcaataaagctgtaccttggctttactaacaatttcttctttatccatctttattgtaagcaagcatcttttgatatccatgccctgtgatgcttacgcttttaggaaaaaattcttcctcaaaacagttcaaataatattattcactaatgacatataagacttatttgcttttctagtttattactgagtgaggtttgtttgtttgcttgtttatttgtaatggtagagaattctgaaaaaaaattatagggtgaaaatgaaaagaaaaagtaacaatctttgaattgtaataaatatattatgacatattattatagaaatgcagtttaaaatctgtttagtggcactagtacacataattaattatagtgtataaagaaaagtcacttgtatttggctttagatagcaatatgatttcaacccatttctacctttctaatagtttccctatagttaagtggacgatgaggtttactttcctgaacatattcaatctgatagttaggtggaggaagccaacagaatgttgccacccaatgtgggtggcagaatgaagtcaaccttgggtttcataaaaatcagaatgattgatagatgtaaccaagaggtaaatagagagaaatacactaaaacaaaatatgaaaattaagatttactaaaaagttcatttgggaaggaatattttcttttgtattatatgtaatctttaaatgtatgctttagaagtcaatattacatgtaattttatcattgtagttatataacgttaatgtattctctttcattaaatcaaaatgaaactatactttttaaaaaaatataaatatggatagtttgcattaatgtattaaactccccaaatgggcttttctctactaatggaattaagaatattttatttttcttaaataaaagccaacctgtgtaagtgcaatgatatgataagaccaaaaatgtccgcaataatgttggaagaaaggttttaataaagtaatgcttatttaatttatactgttaaagtataaaatcattataatgaaataagaaaacaaaaaatgtaatgtcatttgcagataagaactgtgaactttttctttttggtttccaggccatttttaaaatttttaatttaatctttttagagatcaattctccctgtttcctgtgctggtcccaaacttcttggctcaagtgatcctcctgcctcaatctcctaagaagctgggactataggcatactgtgcacttcttgatgtaattattttcagtgattgtgtgtgtgttcacaatatgatttttagtgtaatattttattataatcattctccattttatttgctctcaaccagtattgtagacataattctatgattgcctcaaagagtccacttcctggtgcatggtccctatgtaattactggaatttgacaatacaatgggctggtcacaccagccattaggttatgttatatggtatagggactttaagaaagggaggttattttgggtacacctgaactctcaggtgagccttcaaaaggctcttcctagagaagaacctcaaagcataagagagattacatgatgaagattctgcattgctggctttgaagatggaggggccacatgagaaggaatgggaccagtctgtagaattcaataatgaccctcagctgctagcctgcaagtaactggaaacctcaattctacaactgcaaggaactgaatttggccaatgatctgaatgagctggagaaaaaataattcctttgagtcttcaaaaataaataatatctggtggacaacttgattttagccttgtaagactgtcatcaaagaactcagctgtacttttctttagacatctggttcgcagaactcatcctaataaatggatgttgttttaagccatgtaagcctccacgtttgtgaaatttgttagaaagcaatggaaaactaatacaactagtatttttacactggatcttgttaacctgaaattaatttcaaatttcattatatgcttattgggcatgctaagaagatgatcatgtcgttaaatattctagtgaatagatgtcgctctttcctgttttctcaaatcacattttaaaattatcataatcacattaatgagaattttgcaagaaaatttagacacactacctcatgtagctggattaggcagaagtgaacaaccgttattttgcttttgtgcctaaatattagtgccttacataaaaaattgacatcttgtattttaaagctccacagagaacaaatgtcaccatttttaggtgacttaaatatggttgtgacattgtataagaaagggttcataaagtaaggactgtgaaaactgctacatatatatttataagctacactaaagacatcttggaaatggatatgtggttattagtctaacgtatggaatcacagacattttcagaagtttacttcataaaaatacatttacttatgttttaatcaactattatttaaatctattagagcagtatatatttagctaaataaataactatgtcaaccatatataagcatcaaccattttattctggagcaggtttttcttttaatttttatgtttttagcatttcttttatttttatatatttttattattttaacctttgttttcggttcaggggtacatgttccaagtttattatataggtgaacttgtgtcatgtgggttggttgtacagctgatgtcatcacccaggtactaagcctagtggtgttagtttgttttctgcagtctctccctcttcccatcctccaccttctgataggccccagtgtgttttccccttctatgtgtccatgtgttctcctcatttagcctggagcagattcagatgacactctaaatgctcttgtaaaaataaaaagattagtcattttaaactctcattatattttagtattgatctgtcaggaacttcttaagtgagctctaatcaatgttttcttcttatattcttttaattttctgttgtaatttaaacagttatgtggtacaagtttctctgagattctttatagaaaaacatagaaaaatcattttaaacagaggcttttcagaaacaccaactttataaagttttaatctagataaaaataatttattggctgacatgtctttacaagaaaaatgttctttttttcataagtttgtgaaaaacaaaggcaacacaaaatttagttaaaagcaactataattttctcagcatagataactgcctatgcatttgttgcttgtgaatacctataaatggacttcggaacctaaaatcatggatataattggggaaaaaaaagaataagcaaataagcattatgtcaaattctaattatactcttttatataattaaaatatttaggttacttcagtctgcattttaattgttaaatatcatttaaaataatttcttatattcattcatacttactgaaatatgtcctgtcctattttctggttgttactaaaattctgtgatactattaaattcaactctggaaagcactgaattatataacctttttaaaataaaatggcatacatagattccatgctgaacaatgcacctaatcttatagcattttatgttactaaaaaatgctttaataacgtatattttcttcacagtatgagtataaattaactaatgcttgtcaagtatagtaatttaaattatttaggatgtcagtaaacaaagtttaattctctccatcaccaggaaaaagtggtttttcatgaaatagtgaagaaaaatgtatttcctgcctatgagtagataaagtgacagacattataatgactttaatcaatgtttcatatagattacattatgggaaagaaggaaggagaaatttatattataaaacatataaatgaacacacacacacatacacacacacacacacacacacacacacacaaaattgtaaccttaccttctggtttctagtctggcatgtaaagagcttggaagttgccaatctgtcctgacaagtaaaagctgaacactctgaaaaactgacaactcttcttgcatctatcagagaagtgaggtaatatagcaaaccactaccatcaaaattgcagagacaaacaagtgaattcagagaatcacgacctactggagcagaatcacaacttactggagcagaaacctccatgggaaacagtaccagggcggaaaatcctaaactgtaattgacaaattgctggaggctcagtatgaacaagtttgagacttaaacactccagggggacccattcatacaggggcctgcaaacttgtgtgagttttacctcaaggtgctcatgttgtcacagtaaatatcagaaaaactcccttcctgcaggaggaggggtaataaaaacactaaaatacgccagagcactattttcttcctaacaagatccaccctcaagacactcttttatctcagcctaaattattagattttttaaagagcctaactgatcggaagggaaatacccaactccagctctctgcagtcatcctgcctcactaacagggagtggaggacgatgctgagaaccacatgtaaagttcatagaccaaaggcacaggcttattaaaaaattgaaaccaaattataggactatagaatgcttcccattcccccctttacattaccacaacattactgaaggcctatttaccacagtaccttttacccagtgcatcataacttgctatcaataaaaacattaaagtatattaaaaggtgaaaaccacagtttaaagagatagataaacatcagaactagattcagacatggcaggaatgctggacttatcagtctaggaatttaaagcagttatttttaatatgctaaggactttactggacaaaatagacaacatgcaagaagagatgtgcaatgtcagctgagatatgggaattctaaaaaagaatacaaattaaatgctagagatcaaaacattgtaacaaaaataaagaatgcctttgataggcttatgagtagactgaaatctccaagcttgaaatgtcaatggaaacttcaaaaatggaaaagcaaggagaaaaaagactggataaataataaagtatatctaagaactgtgggccaagtacaagtggtataacacatatgtaaagtgaataccagaaggaaaagaaagagagaaacagaagcaatatttgaagtaataatgactaagaatttccctacattaatgctagatgtcaaaccacagatccaagaaactcagagaacgccaagtagtttaatgcaaaaaagaaaaagaaaaatatgcctaagtgtattttattcaaattgcagaaaataaaagaataaaaaaaatttaaagaaggctggggaggggattagggagtacaccctaactatagagtagcaaaattataaattacatctgacttttcttcagaatctatgcaaacagaaggagaattgattgaaatatttaaagtattgagagtagaaagccaccaatctcaagatctgcaccctgcaaaattattgtttgaaaataaaaactttcttagacaaacaaaaattgagggaatttgtgaccagtagacatgccttacaagaaatcttaaaagttcttcacacagaaggatgtaatataaatcagtaaagtggatctacctaaagaaaagaagatcatcagagaaggaagacgtgaaggtaaaataattacctttattttcttattcttaattgatctaacagataacagtttgttcaaaatagtaacagcaacaatgtgacaattatgtatgcttatgtgtaagtaaaatgaatgacagtgagaaatgagtgatccaaggactagtaagaattgctaagttctgacacaaggaatggtggaattaggaattttttttactaaaaactactcgtattatttatgaagaggtatggtgttatgtcaaaatagattaattgtaaatgtatacttaggtataaatctaataaaatttatgtaattacaaaactgatggaaaaaatcaaggaactaaaaaagtgaaaagatattctcttcatgaataggaggcttcaatattgtcaagatgtcagttcttccaaacttatctacagattctatgtaatctcagtcaaaatcctagtaagtggttttgtgaatatcaacaaactattttaaagtttatatggagaggcaagaaactccaaatagccagcacaatatgaaggagaataaacactacccaactttaagacttattgtaaagctacagtaatcaagacaatatggtactggtgaaagaatagacaaatagttcaatgaaaagttcaaccattgtggaagtcagtgtggcgattcctcaggaatctagaactagaaataccatttgacccagccatcccattactgggtatatacccaaaggactataaatcatgctgctataaagacacatgcacacgtatgtttattgcggcactattcacaatagcaaagacttggaaccaacccaaatgtccaacaatgatagactggattaagaaaatgtggcacatatacaccatggaatactatgcagccataaaaaatgatgagttcatgtcctttgtagggacatggatgaaattggaaaccatcattctcagtaaactatcgcaagaacaaaaaaccaaacaccgcatattctcactcacaggtgggaattgaacaatgagatcacttggacacaggaaggggaatatcacactctggggactgtggtggggtcgggggaggggggagggatagcattgggagatatacctaatgctagatgacacgttagtgggtgcagcgcaccagcatggcacatgtatacatatgtaactaacctgcacaatgtgcacatgtacactaaaacttagagtataataaaaaaaaaaataaaaaataaataaaaaataaaataaaaaaaaaaaagaatagaaagtctgcaattaaacccatgtaaatatagtcgatttatgtttgacaaaagaccaatgacaacacagtgcagtaaagacagtcttttcaaaaaatagcgctgaaataactagacatccatatgccaaaaaataaaaataaataaaatctagacacaggtctcacaccctccacaaaaattaagtgaaatggatcaaagatctaaaagtcaaatgcaagactacaaaactcctggaagataatatatgaggaagccgagatatacttgagtatactgatgactttttaatacaacaccaaagatacaaatcatgaaagaaaaaattgagaagctggacttcattaaaattaaaaacttgctctgctaaagacgttgtcaagaaaatgagaagataaaccacaaactaagggaaaatatttgcaaaaatgtatttggtaaagtattgttatccaaaatatacaaggaactcataaattcaatatgaaaatgaacaacacaactaaaaaagtggacaaaagatttgaacagacgcctagccaaagaagatatacaaaatgcaaataagcacatgaaaagatactccatgtcatatgtcattagagagttgcaaattgaaacaacaataagatacccctatacagctgttaaaatgttgaaaatacaaaatattaacaataccaaatgttggtaaaaatgtggagcaacagaaactcttcactgctgggacaaatgcaaaatggtacagacatttgaaaggcagattagtaatttattataaaattaaacatactcttaccatatgttccagcgattacaccacttgttatttacccaaatgagttgaaagcatgtccatacaaaaacctcacaaatgtttatagcagcttcataaaaatttggaagcaactaagatgtccttcatcagtgagcagataaattggagttcagccattcaacggagctttattcagtgctaaagagaaatgagctgtcaaattatgagaagacatggaggaaactcaaatgcacattactaagtaaaagaagtcaatgtgaaaaagcaacacactgtatgattccaactatatgacattctagaaaagacaagttatggagacagtgaaaggatccgtagtttccaagggtttaggggaaagaagagatgaataggaggaacacaaatatattgtcagggaagtgaaactactctgtattataccatattgatggatactgtcattatacatttgttaaaattcatagaattatacaactccaagtgtgaaccttaatttaaactgtggactttgctcacatgataatgtcagtgtaggctcatcaaccttaacaatacatgagatacctctccagtgatagcaagcaaagatgtgcaaatgtgagtgcagggaaaatctctgtaacttcagctcaattttgttgtgaatctaaaacttctctaaaaaatgaagtctattaaaaagttttcaataaaataaaaaatcttattctgctcattttctagaccagagattattagcctggggtaattttgttccccactgtcagggacatttagcagagactggagatatttttgattgtcacactttcatgagactatgggagtgttgctgctggcagtcagtgggtagaaacaagagatatttctaaacatcctatgatgtgtagctaacaagtgttaaccaacctcaactgtcaacagtgccaggatgagaaacactgccctagagcatgcgaagtagatttctcttgaccagtgcatatcccgaactaagcaaacatttgtctgataacctttaaaaccctggaatctctcattacaattctgctaattctccatggaagcatgtgccaatactttcatttgagatgttatgtgaacatgtcattataaataacaacttgcatgtagtgcattagaatttgaatctatataaaattcatgaaaaatgatattgccaggttcatcatggatatgcaaaggtttaacctcaaagtgatccaactacaaaccaagtctttaggcttatctatcaggtttagttcatatgcccgcatataccaccacagaatgtcctatgcccagctggctgcttgcctgtgcatctctgttcttgttgggcctggcagccctcttccaaatgttaacactgaggcacgtgagccttcaggataacaaacttacatgctagagataatcatagagagtgcagtgccagcagttggtgagcagattttgagtcatgtttagacttgccactgaaattctgcaagaaaagaacatcagaagtgaggaaaagacaaataaaaatatcttcaggatttggcattataaactatatacagcctcacatttttaaattttgccatggacttcctgttaccattccattgaaaatacactaatgtgaaaagttcctgaagattccatgttgctttctaactatttgataatcacaaagatggcatctctttttttcctcccattcctcatattcctcttcctctcaattccacggaagggaaaagtagcaaaaggtgtttgagccataagttagtggagtcccaggtgtcacaataaatgttgtgcattattttctcacacatcacttgagtgaaaactttgtgtatcgaatttaggaaactattgattgcctttcctcctggagaataattatagacaaagttttatttaaaaaatccaatagttactgagggaaacgtagggaaagaggaatagaccagtccagttaaaacaaaacaaaataaaacaaacaaacaaaaaacactagagcaacaatgggatgacatctgttgaaaagaaattcagtaccgggccagaagtgagcgggctggctggccaaacattatgcattgtgtaatatattggatccattgtgacactatgcattttcagttaaatttataaaatttatgatatcgattgctcatatgatttttcttgtaaaaaagcatgtgagatagagccaaaataggtaaattgttttgaaggcctgaagcacaaacacaaaagtttgggaatatccagaggatgtttggagagtcttttatcatcccagttcacactgggataacttattgatttatagacagaaagcccatgatatacaggagatgtggatttaactaattcaaaataaaattaatatcctacttgatttatttctcaatcttatgatttttcagatgtgaacaaaaattactctggtaaaatgaattatttctaacattataaatccaagaataagaggattaaaaatgaaaagaacatataagcaagttgaaggaaacctgaccttaggaattccactgtaaataatctttcagtttactgctatatacagtttaaaaaaatttgcaaataaggctgggtgtagtggctcatgcctgtaatcgctttgggaggctgaggcgggaagatcacctgaggtcaggagctcaagaccagcctggccaacatggtgaaaccccgtctctactaaaaatacaaaattagccgggtgtggtggtgcatgcctgtaatccaagctaattcggaggctgagacatgagaatcgcttgaacctgggaggcagaggttgcagtgagtcaagattgcaccactgcacttcagcctaggcgacaggagcaaaactctacctcaaaaaaagaaaaaaaaaaaaaggaaatagaaatacaggatactcagttaaatttgaattttggtcaaaaaatattgttattataagtgcatcttatgcaaaatttgggacataattataccaacgtatgttttgttgtttatctgaatttcaagcttaactggtcatcctatgttttatctggcaattctatcttttctgtcatctttgtatccattttgcaaatacattttatctattctccctcatattcatctactgaaaaaaaaacgcatttttgcttttcaacaaatattcaagatctggaaagaatatagagcttggagaaaaatagcagacaagaacaacatttaataagacttttaaatgaagccactggcaaagagtggaaagaaatatttcactctctgtgctaaagtattgaaaatgttcagattgttcttatttttcaagattcaagtaataatacattagggtaattttctctttttttagtggaaatgaatgactaaatgaacaattaaaatacttttgcaatattgaactgaaaaaaaaaacctgttgggggtaaagaagactaacttgaatgttatttagtttttaacattcatgttatttaattcttaacattgacttcatcttttggagaaaagagtgaaaacccttcattcatcatctgttagtaaaattgtttctgaaaaatatatttgtccactagcaaatactgaattgcttgatttagtgatttaatttgacttagaaccatcacgacaattacaaaatcacattaaggttaattagaaaatcacattaaggttacttaacttaagtgctaattggtttctatgagtgttataatggtgctaattactctccctttccttgggttctaaccagttgagaatgactccactgggatacaagtattagggttgtaaattacctgtgtgcatttatttcctatgaagtgtttctgctaaaccgaatcagatgttggataagcataaggtcaaatgaggttttccatttttctctctgttgtactgaagacagctgcatccatacagctaacttagcactccagggcgggctgagcaggtagactccctgttccccttgccagtggcagttgtgaataactgtagaaaggctggcagccttgaaaattccctgcagaggtgagtgtgctagcagaattatatatcatgtaaataatcagaggccaggttgacatatataatacttgatgcttttatattttcagaactcaacaaacatttctctgcagggtgtgaaacccctaaatattgtgctgcttgatgcctagaccgatggtttgaggacacatctgttgaagttaggctttgcaaagaagatagcaaaaacctttttacaatgtccttatgaatacaatacacactggaagaattctaattatgaggcaaatggaaacttaatgggctagaatggtttaggacaaggacttcttgatcagttccttgttcttttcttgtaatggaccaggctgatgggctccatctgttgacaaatagttttattttatattttcaatatttggctcactgactactgtattaagctgcgttcaaaggtttatttaaagcatcagctgggatctaatgctaggtaatcatttgtaggtattacaaatttaaaaaagtatttttatttgagtttatttccagtgcccttttttatactaatgcggctttcctctcttctagttttggacgataataagttatttgttcttgttcttcatatgtttacatattaccaaacttcattagttttaagccaggtatattttcatatattgccatgtttgaaattggattgggtcttacaatcaaaagcattgattttattgattgaaacagcaaatattttttctttcctgatgatcataaaaatcaagaaatcaaatgttaaacaataggacattttgcaattaatgacatcttagacctaaagaaatatgatatttcatgtgaggcagctctcattagccataaatatgtttcttttgccaatcttactgatgataccctgatttttacaaactccttcctaatttagtaattctttcaattctaaccatgccttctggtgccatttcatgtgtttgtgcatatttttctatgtgtatatgcacattgatggacatttaaagatagaaattttgaatagtttaattgttcctttaattatacccagttaacataaagcaagctttagttcatgtctcttccaatttgatagcctatcatgaaaaatgtcagaggctcctgttgatcttatgtatggaagaggagacagacaacaacccaggaaatatatttatgtagaatgttttttcaaacaaaattatgctttaaaatgctgtacaaagagtaaaaatttttcttgacgtctctaattatttctcacactccaactgtcaattagttgttctaaactttaaaaggttgtcttcatgttggcataagtgatataaaactattgatatacatgaagatgttttgttagaattttattctctctttgaaaatcctcccaggaaatagcaactaaataataacaaactcaaacaaaaattatatgattgatgtgtaaataaaactcatttttttaagaaaaatcataaatatttaggaaccactatagttttttctaaaatccaaagaaggaagattccagaatctttttaatgatggcctgctgtcaagaaatttgtaatattcattgttacattctggaggtttagttgaggaagttgtatttttcattcattaactctactaactttgacttttcttaattgtgtgtaatcaatgttataaataaaaagaaataaaatttaaaaattaattataaaatgcttaaccaaaaagtatattttgtactgtcacatttgatataaagataaattaagtataggatgagattaaataagagacttaataaaaactatgctacttttatttaataatgataaaagtttggaattcagcatatgtacaaaatgcaattgtaaaaataacatagaaatcggataacataaataatgaatgaaataaattattctttcaaatttgtgaattgaaaaattaatatctccttgtatttcctaaaattatgaattttgttgtcttgtacaaaatatatctaaattgtcactctatagcttatattataatggatggacaaaaatacatctatataattataggtaagatggcattaatatactaacagtgattatccctttggaaatgacatattatctaagtctttgccattggataactaatacaaaatctagaaaaatatgtattcatcagtgtacatgaaatacatttgcatatacttttaatgaggatatatttagaagttttttctcaatgtgactattgtcttcaaaggatagaagttgttttaacagaatttgaaagattcaaaatatgtctaaaaaatagtttagccatgaagtgggggatggggaatgctgtgaatataggctattagcatctcagtatgttgcctattatactaatatgtacacccttcagaaaccgaaataaaggagaaaattgctttctgcaaattggacactgtaagcacacacagagtgtataattaatacaaaggttgaaaggtgtattcattagccatttttgtactataataaaaaggattagtcttgcttataaagatattaaaaggaaactaagtttaatataattttttgtagaaaaaatgaaactctagcatttagaatgaatgaaatcacagttttgagtttttatgtagtaactgactttaaaggaattctttatcaaattattaacaaattatttagaataatacaataataatataaaagtctctttcatgacttttatattactgtatttcaagtcttctcattcttcatcataaatatttatgtatttttcctaaagattattttgtgtctgttaaactggcatttgccctcatctacctgctaacctggtatgtctcaatgggtgtcttaaaaaatttgctctgctaagagaatagaaaactcatatatcattgtgtacatccatctatagatggtgatgatatgaatacactttcatccctcttccagtcatccaaactaaattctacaattgtttgtggaagacattgttactctttaattgttacccttcaaggcaaacagagagtatacttctgctcacatttcattagctaaagcaaatttccgagtcgggactcactttaaagtacatgctttaaaaagtcaatacttgattttttttgtgcctcctaaacttggcttaaataattgccataaaatgttaaaatgaatgttattttccattttctctaaattcactggggtttgattgaaattgcactgaataaaaaaaatccatttgaggagaaatgtcaactctacgatacttagcctttcaatccaggtacatggcatcatttatctacgtatcttataatgtatctcagtaatgatctatctattttctgtatggtcttgtatatactttggtagatttattactaagtagttaaatttgttgctattgaatggttgttttttttaaatagcattttctcaatttctgtttcttatatataaatataaagttgttattgagcttgtatttcagaaccttgataaattcacttattctaacaaacagtataactacaaattttagatttattccatgttgtaatcataagaccttcaaatttttcttgtaaatattttttacttgttttctcgttgctttgtcttgacctgagaagaatgagaaataatgctgtccatttgaattaggagtccatctttaaaaagggatagtacaaatagtgagaagagctttggctgggaaattatgcttcagctatagcacagatcatctgtactacatcacagggcagctgtactatattggggaagtagtttcagcttcacacttgtcatctttcttttccttataaaacaaagtttaaaagattccacagtttttcttagtgataatattctattattttaatctataactggttcttataggattttaaattttacttctataaaatatcttaatgttaccttagaagaaatatatactgaaaatctaacttcaagggagctatgtatctcctgaagacatgaggaataaaataacctgaaaagggcatgttcaactaaatcatcctgaaatatttatttgtatgcatgttaaacctactcacataggtcaggcaaaatatttttatattaagaatgtttcagtggatattatttttcctattcttagtgctatgaacctctcttataattttttttacacatatatgtataatgatgttttgaatccacggatacaggcttcagagtcaagttcagtttccttgaaatagtgaaacctaaatggacagcacttaatgaaaatgagactggctgcaccaccccattccacacaccatatgtcctgaatagcctctactctctgccaagatgtaattcaaatcagtgacctagaaatgaaagactacataccccattaccaatcaattccctgagccattcagtctctactcagtaatattttaataaatcattttcatttatattgatgagccgttaatgcaaattgtaagtaaaaggacagttgacttttattagcaaagacacgaatatataatatgctacaccaaaaattccatgccctatgctctatgtgataccatgtaactcattcaccagaggaaaagatgaaatactagtaattttacagaacttcatgaaatcatatttttacatttcatttaatatcttagattgtttctaaataattgtagataaaatgtttgaaatttgggttacattctatgctatgtttctgtttcattcatgttaattaataagaggtagttccaatgatggaaagagcttgacaactcctaggcactcttttaaatgccaatggattgtaccttgtttgtgtaagcctaaagctgtagttgtgtaattccatatccatgtgtgaattctgcctgcctccttcccccgagtataagctttacttatactggtagtatcactcacattattaaaacaatagtgacactaattaacaatgagtattttagaggttttgaagttataagttgctgccacattaattatctcgttaattagccttcaaaccctgtaatttgagtgatttaatcattcactcaacattattttagctactttatggaattgtagtaaatgccaggaatataaaaatgaagataaaaagccaaagccctaatgagtatgtcagcaagggttattttccctggacagttgtgttattcttacttcctcagtgctatgaagaatcaaaaactaatcatcttctttaaatgtgcagaaaagaaaagaaaaacacacctttctgcttagttgcagaaaccacctctgcatgagtcaagctctctgatgaatgaggaaagtaaagacactatattaatgtttttcaaattgggttccatgtaatttagagtatggtgcagtattaataagagttttgatcaaaacattttgtagatgaaaaaagtttgataactgttcatattacattttcttataagatttttgcaatatgcattaaaacttccgagaaatactgcagtaaataatgtagtttgactttattattattaaactttctcaaacacaaaatcacttcctttttggaaatcttacagtaatatagtgcaggtattgttcttctatagactaatagaagcattcagctagacaaattaaaaatggtttctagtattattttacctttggcttttagtgatgttgtatctgtctcaatgtttattaaaaatagaccattaacattcatgcaagctatttaattcctttgaatttgttgaaaatgcagaatattaggtctcggcccagatttatgatttaaaatttgcatattaacaagatcccaggtgatttgtaatcatattagagtttgaagcattaatttagatcagttgttctcaactgatctaaattagttagttagttctctagactaactaagttagttctctagactaacagcattaacattacctagaaatgtgctggaaatgcccattgttaggccctaccccagacatactgagtcagaaatcctaaaaatgggacctagttatcagtatttataaggttcttccaaatgataatgatggaagctaaagtttgaggatcactgtttaacagtggggttacattaagtcatttggaggattttgttttactttaatattaatatctaggtcttgtgctcaaatgaagtaaatgagaatgtgggtatgaggatggaaaggtgctagtcataatgtgttttataaccttctaaaatgatagtcattcacagtcaagattgagaatcactaatcttcgtaataactccatctgctgtgaagattgaattattttatagagataaggactcatttaatgaccagggcaatggggacaggacagatgtgtaactcatgttagcagagtaacttacaacgcatctaataacgagatgaaattagccattactatggttcaggtatggttcgttggtccccaccaagtctcattgaaatttaatcctcagtgtggtgatgctgggaggtggagcctaataagaagtgggtgggttagggaagcagatctctcatgaatggcttgatgctgttcttgtggtactgagtgagttcttgcccttgtgggactggattctcaggggaatggattagctccaccaagagcgggttattgtaaagtgaggttcttccccctgtttcatccctcttcccatatgcctgcttccctttgaccttctccatcaaattttgatgcagaacaagcgtccttcccggaagcagagtagttgctggcgccctgcttcggcatcttctctgcagaaccctgagccaaagaaatctattttctgtataaactacccagcctcaagtattccttaacagcaactcagaatggactaagacaactgtattcatttgccaaagcaagaagttctcttggaattagttaagtctcactattgtttcgggaagctggaaagtgggtgctcataccgatatgctcagattaccctttaaccgggaagcctgttcgtctccttccaatccctgtgcgcctcttttcttttctctcctctcctctcctctcctctcctctcctctcctctcctcccctcccctcccctcccctcccctctcctctcttttcttttcttttcttttttgacggagtctcgctctgtcgcccaggctggagtgcagtggcgcgatctcggctcactgcaagctccgcctcccgggttcacgccattctcctgcctcagcctcccgagtagctgggactacaggcgcccaccaccgcgcccggctaatttttttgtatttttagtagagacggggtttcaccgtgttagccaggatggtctccatctcctgacctcgtgatccgcccccctcggcctcccacagtgctgggattacaggcgtgagccaccgcgccggcccccactttgcttttctgaagcctcacagctggtacttacatacttttaccattgtgaaactcaaatagctagagctgtctcttaagtgatctaacattctttattcctatggcctcttctgtctcctagacctctgttacaacagtggcaacactgctcagtgtgtcatatataaaactcaagaccgttttggtttcacaaaagataagcatacataacgtgggagaagtgccctcataaaactttctgcagagtaagaaaattaccagttttgtgtggagggtacagctaaaagtgaaattgtgtggtatggcaacacaaacatcttagaaatatatttaagaagttcttgttctttaataatgttctctggtgacgaataaatatatttaagaagtttttttttctttaataatcttctttaataatattctctggtcacaaagagcatgttggttggaatcaacatggttttggccacttctctttccagacacacccaagagtactggtcctccctcgtttccctcctttaactgctctttgctctgactgtctcgtgatatccacctttgtatatcggtgctaagaacaaaacacctcttcctaaaagtgagcagcctaacccaccaaggtggtcaggagataaaagtgatttcactccagcatgaacttctttccttagaaagccattgtatttatataaggtacccagatgtgtacattgtttaatgtgacaattgcatgcacacttgttgtccaggaagtctgccactttgtatttgtttgtgtgtgtgtgtgtgtgtgtgtgtgtgtgtgtgttttaaatttctaacaaattattgttagtgatggcataagaacatatcattttgggactgacaccatttacttagtgctgtcggcttctgccttgggtttggtaacatttacttagcacttcaagcttctggcatgatatcgtataattgcatgtgagactcccgtgcagtgaatagagttcttactttaatttggttaaatctgaaagacaatcactcttgaacaactttatcattactgagtaactacacctcgttttcaaggatggcatagaggtgcctactgataaaaagaattacactcagaatccaactgtcagggactgctgacttcttactatctcaggtgatggtagaaaaaatattcctaccatcacctgctgctccctctgccagtcatttgatgtaccatccatggctccacagtccacgctattgacagcgtgatacagagaagaagggaacgaccaggccagcagtccagggatcagagggaaaataaaataaaataaaataaaaaaataaaataaaataataaaataaaataaaataaaacaaaacaaaataaaatataaccagaaaattatagatgagatatacagaatgaagacaagaaaatacaaaaactctcctagaaaacagtctgagcagcctactattgagtacaaaagttgtcggaatgtgtttcctgtagtaggattgtcactctgtggtatagatctatatttcatatatttcactgttctatggcagttttttcacatgaaattctgtttcttgactttcagaacatgaaatcaacatatagacaaaatgcagaagaaaatttcaattatggaaaagagagtaaatattttcaagtttggcctttttaaggacacattgtcaaatgtcagtgctctggagagaagttggttgtttctcattctttgttggttttgaataaatctgctataaatatttgtgttgagatttcttgtgcgtgtacacataagcattccaatcagctgtacaatacttaggagcatagttcctagatagcatgctaagactatgtttatatttgtaagaaaaaaaaaagaccaccaaattgtcttctaaaatgtatcattgcgacaaaagattcttactctattaagaatgtataaagtataatctcattaaagattagggaaaagatactgacttaggtaacctggaaatgagtggagtctgtaaaactaaacgcaaaagaactgcacataagcactaaactctagtaggaaatgttgttccctacatgggtacaggctaaggattatgaaaccgcgacacatatacactgaaatttaacagttaggtaaatggaggcaatctagagaattatgtttctcacacttcaagtgtgagaaacatgattctcaatatagatactaacagttacatttataagaatgtgtaaatgtaagggttggaatcaacacattgtcttgctctgtcagttgagaggaccttggagcaatgccacaccagaacagcatatctagtacccggatcttagtttctaatgtcactctccaattaaagggcacagagtttttggagaaatgactgattctaggacagggtaaaggatatacaagatgggactgaaaaatattttagtgccagaaaaaaatggccttcttgaaaaaataaagaaaaaaataacagaacaaaatgcacaatgatgagggaaagacaaagggaaacagggtcaactgaaagagttctcaatggccaaagctgggatgatgtgacaaatgaaataagtcagtgttggactgtaacacaaagtataaaataaatacttaagagttcatgataatatgaattattgaataaataaattagggaaaatacacaaatctctcttgtaaaaacatgaaaaacaattcatgggaatactcagcccttaaataaatggagcataactcctcattccttaagtatgggttgcacatagtgacctctttccaaggattaccatatggaaaggcaggggcaggcctgggggaaagagtaagtttatattgaagaaatccgataagcactatctctgccaggtgagcaagaataatatcaacagtgataattaacattgattgtatttatacttgctatgatacaatgagagcagcacttcacttctgtggtcttcttcccaaaaattcataataaaaaattaaccagctgggcacggtgactcacgcctgtaatcccagcactctgggaggccgaggcaggcagatcacctgaggtcgggagttcaagaccagcctgaccaacatggagaaaccctgtctctactaaaaatacaaaaaatgagttgggcgtggcggcacatgcctgtaatcccagctactcgggaggctgaggcaggagaatcgcttcaacctgggaggcagaggttgcagtgagctaagatggcaccaatgcactccagcctgagcagcaagagcgaaactctgtctaaaaaaaaaaaaaaattaactgaatttacatttttaaagaaagttgataaggaatatataacttgcaaaaatgtttattgccatttatattccaccataagggccacaatgagacacaacagtcataagatacagatctagtgaggaagcgtcagaagctattttagagtttatagttatattgagcaaactataagcaaacgtcatggtgtaattcacctgccactgctagctttacagttacttaacactgtgaagctgaagtttcttatatagaaaaactgaatgttctaaaaattaatttggcttattttaaattccaaggtttcttgtgtacacattgaaggtacattactaatatttttaaatacgttggctcaaacaacaaaagaagtttgcaaagaattaatatgcagttttacatcagtgcctttgaagactgcaggtagaataaaagttaagttagtgccaaaagtcatttgattttaagtacaatttatgtcatcgagtaaaatttgtcaaagtattaatatatgcttctgaaagaaaatacctgatattattctgaatgctattctaaatatagctaagaaattagttgttggaaaataatattttttttattatggtaatactaataaaagttttgatggaaaacaacctgtggtaaaaagaatatccttgttgatacattcaagaagacagtaagaaacacacataactcatggttgcatctaatgaaactgcgataatctactaaatgaaatagagattacgaacaacaaaagtttaaaagacaatgtactcttttctatgtagatagtttatatattatgtatataaagtttaaaaaattaaatatatgcttgcataagtttaaaaagacatatcttttaaaaatatatgaatatttatatatgtttacatatatttttaaataaagtacatatcttgtaattaagcagaggataaacataaaaataaatccttcattatggcacctctgatttggatgataaataatatgggaattcattttagagaggcgaatatcgttaccaaatattaatttcattatgttttatttatttatttgtctgtggtttttttagtgctgattgccagattagaagctgattggattcaatgctttatcccggcgagttaaaatccaaatatctatacatcccaggtttcaatccttctggtaatttgtctcttctaaactcctgctatttgaattaaaatatcttaactgctctccatagtctgatctttgacagactaacaaatgccgtgctcttaaattattcctggcacacagcttctgcgacctccctcatgctcaacccaatcttcactcaggtcacccttatagagtccaccacaaaattaggatggatgtctacttgaaaaaattgaacatcacatagagtggcaagatgaagaaagatgccaggtagcaaatggcatgtgtttaacacagtcatgtgcaaatagcaggtgttcggcgaatgctcacagaataaatgaaaggctgaatctgaagcactaactggaaattgagaaattattattccaaataatagggatgtcagtgtgtttaaagacatacgtaatatcattcaaaagcaaatatattccacatagacacattcttattttgatcttcataaagtgccctacatcattttatgtgattctctaatacatttattacctttctggttatttatgtggctcactttcttgttattttcctggctaaaatacatttaaagcttaaaatatagcatttctagtgatcattgcatgatcacttctgttttttacactgcattttcaagcagctcttagcatacactataaaaatactcacatttcaagtatttctaatggagtttatcttaagtatagcagttcccctcttgaggattataacactaagtgatttaattaaactgatcaaattaaagtgaatggtggcataagccctagagtgacatatatttcagttgtgaaaacagccactggagtgctttacttacactctccatttgacatactttcagatcttactttctaatagagtattcaactataccaaataaaaggaatgctgacaatttgaactatttttgttaatttaatatgtatttctttattgctaaatgaatttatttataattattgttctattgccctaagttacaacatttatacgttgaatacctaaatgcatacatgagtttaaaaagttgagaaaaaatttccaagtgctgaagatgatgtattttgtttagtttcaagtatattgtgaaggaacatatctacttaagagatatgttaatgtccattggatgcttgggagagaatgtctagatcttgctgtaaaatatattaagtgatgataaaataattggttaccttccaaatcttaaacatatcaaaggcattagagctcggactttattctcttcccaattttttgagattgaaattggtgcagatgctgttatcttgcctgtgtttaatatttaatttagtttttttccttaaagtttgaatatgtaatatttgagaaaacacatgattcatacaactgtgaaataattctatcttttatagtaagtatttaaacaagctgcactattaacttttccataaatgtaaaccacgttttttgcattggatcttcatattacagtcttctacctatattgtgtgtactgagtatataaattataagcagtataaatatcatttctaatatctataactttcacggaaattgtactaggctgcagataggaagactgcttttattttctggcttagcttcaagaactaaatgcctgtataactagaaaaagtcgttatgctttcttttctcaatttcttcatatattgaactaggagagtaagggcaggaaggatgcattaaaaaaacgcaaacagcgaggacaatgaccaccaagcaccctagaaaatgacagaggaggaaataaaataacaaaaattaaagtaaatatctgaattatgacatagtattacagtgaatgttgatactgatgaagctattgttatgaattttgcagattatttacaaaacatttgcattcattctctactactttttcatagatgtctatgacataaccaaagaagaaatgtattaacctcattttagaaagggggataatatcagtttgaaaagtgaaaccacatattaagttgtaagctagagattggataacagatttttatagtacaaaggctgtttgaattgctcattctcgttatctgattaatccggtataattgaagatcatctggtttattcacataagcagaggatagtctttctctgtgtgcatggctgaagaacttcaacctgcctgtgatgtaaatgccaggtgagtcttgtagatgctggggtgatgaatgtgtgaggtaccctacctacagcagaggtaagaaaaaacttctgagacaacaaagtaactgtcattccagcacctgaaagacaggagcaatgtttgaagtgatgggccacatattaggttagataggaaataaattggtttctaaaagtagtaaatagaccaaaagtgaaggaagagacagaagacttggaaattccaatgaaattataaagtagttatagtgaaaatagcagaaagaaaaaattggaaagatatgattactagcaaataatgggatattgatctttaggcatgatcactatatgggcacacccatccacagaacaaagtgattgcttcaccccatgatgtgagaaaaattgcagtgggtgctttatttttctttctttctttttcttttttctttttcgtttttttgattgtgtgtgtgtgcgtgcatgtcttaatagcaggtggtgtatttttaagttatttgtaaaagctatgtgaaagcagcatttatgcgaaattggtaaatatacataatgtgagataggttggtaagaaactgaaatctttaaattgcagcaccctcttccatccagccaaggtagaaatttctacttccatgcactcaattactatgtcttccagattttgatttgtaaacatttccagaatctgttcactcttctcaattccggagtaaactaccacgatctctcactgagataatcacctttctacctggcttaactgcctgtaatcttgccctcttccatttacatgttccatatgcaggaaaggtcttcatccaaaaatgagagagtaagtttgatatatcactatattgttcaaaaattttattcacccattttctttaatataaaagcatgcactcttccacgtggatttacaaggccctccatattagcctgtatcatcaccctcttctaactattgccttccttacattctttactagactgtgaaccttccagtttcttgaatatgccatactctcacttacctcacaatatgctcatatgcatgaacaatatgctcctgtgcatggaactttttttaatgatatgctccctgtaaaccttaaaatacctaagcttcctcacagaactcttccctggatgctggactaacttaattacagtaatttattttcccacaaggtgttgtatatttccttttataaaccccatcagaaatttttgacttaacacttctatcaaatatattgttaattttttgcatatttaaactatgttgtctttttttgttatcattgtcaagttgtcatattagaatttcagtatctttataaacttgttttaaactccggaaacagcacaaaactatatccactggatatatttccctaatctcttgagacactaggaaaccacggagctgagattcatgctaatgttaatgtgtcatcatgagcaatgttctttccataacagtgtgttgtttcccaacccaaagcatttaaagaaagataaaaagaaaacagataagcaggaacaccttctcaacatagaaattataggggacaatgaagacttggtcttgtataactacatgccttgcttccaaagttcttatgatgaatgtagctgtccactcaatgacaaaatattcaaacttaagtcttttctttcaggttttgctatcttttttaggctcttttttttttccatgtcagatgttttaggatgtttaaataaaagagaaagatatctgaaaagtcttgaagtacaatataattaatgaagtccttaatgagttaagtttttacaactgtggattcctgcgacaccctattgaaatacccaattaaaagataattaggataaattatggtgagaaaggagataaccttacatcttcaagtaaagaccttcttgcttcacataaaactttcagggtgactcttacagcttcttccaaagaacagaaattaagtacaaggatgagatccattttaatattaacaaatttaatttaaaatacaccattttaaaactaatgtgattagaaatatattttacaaggttatatgttaataaaatttcttgaaatgaagtagaagttatctgtcacgtgttttctcagtattcacacgaacaattcattacaattttatagtagtcatagctgatgcattcactcatttatgtattgggtgtcagctatgaaccatggcaagaccaagacctctgtgcacaatataaatttaaatttggtcttttttaaaaatacatatgtatcaaaatttttctcatttcttttctaaccatttttaacaagaccacactgtgggaataaattatctaaatataactagccatgagagacatcagttatttggaattgtgttagatataattttttaaattcttaattacatcaaccgctaagtaaaactccaatatgaattttagtagctgaaattattaatagcacacttctaaatcattaaaaacaaggaaagaaatgtatctttgtataatatattcatgcctacaaatttatgatgtcttatattcattcataataaataatcaggcaaatcaaataaaataagtttaggcctgagtatattcatatgtgcttatgtatatatgtgtgtttatatgtatatgtgtatatatgtgtgtttttgtaaatgtatgcatttatattcagtatgtaataataaatccagatgatttacattcaaatcctggctcatttactatcttagtgactttacacaagttgctgacatgctttgttctcatttctctttaaaataaaaataatactaattcttacccgggagagttgttgtaacaattaaatgaatagatatattaaagtaattagaataatgtctggtacacagcaagcattctaaatattggcaattatattgtgtgtattttactatggctggacatgtgttcacacccaatggtgacagggagatggagaaggaatgctttttatagatctgaaattctcaagtctttatgatattgagaaaaaatatccccaggtatcatccaaagttttgtcttaagttatttaataaactggcttgttttaagtagaatttgtgtccaaaatcaatcataatcaaaattaggaattttaggaaatttgattgttttacaaaacagatttcatagatgtttatatataagatggtgtgccagatcaactgctacttgctttttctccccccactttcatgttcttttctactgactgagagactttttcttgtaactgaaattttaaaatcatctttagattattataatcctcaatcaatttgtctctgaaattctgttggaaagtcttatttactctctggtagttgtactcatcttcttccattgttgtcacatttttagctaggcatatggccatcgataataaatatttttttttcccaaccttccttgcatccaggcatatccatattactagctcaggccaataatatgtaaatggtcatctggcatctggccatctggcagcacttgagagatgctctaatgagtgagttgagacatattcttcacagtccttttcatctcctcatctttcttgcttccagaagaacatatatgagagctgtcagcacagactattgaggctgagagccacagagtaattaagtgtgtgaagtgtcttactgtaggcaaagtgctagataaaatgaaaaaaaaaatagcagagcatattttacctagtctaggagctgattgatctcttagccaaggaaattattttagctaaggaaagaaaaatcaatattagccttgtggtatttactctgcctgttgtctctgctggaatgcttttcttccaaatattctcatggctaactccttcacgtatttttaaattataacctaagacactctagtactcctgtttcctttaactagtcctactctgcccctttcttattgtacttattaccttctaaaacattatttaatttatttatgtgtcatgattattgtacctatcccattgagatctaagttccgtgaggtaagatttttctttcttttgttcattgatgtgtttcacatgcctagcacaggatataagacagaagcttcaattaatagtttttaaaagggagggaaagtagtcaatctcgatagagaaatatgtgtataaagacaacgagttaaaaatattttacaaggacatataattaatcctagaatggctgcaacatacaaagaaaatagaagagcaatatgagctgaaacttgagatattgggaagttcaaataatggagaaatttctaggtcttcacaagattcagggcttttaagtaacattaaaagccaatgggggaagaataatgtttggactattggcgtgaaaacaactgaattgataaataggatttacttaataaggagagaactgtagacaatggataagtatgcatggtggtaaagaagagttcaattcaactgtggactggctcagctacagtgtgaaactgcaggtgtcaagggagtaggggtgcaaaaaggccagaagtagaggtagttatcagagaatagaatgtatgaactaatgatttcggtaacttcaaatttcaagtgatggcattgtccagggtttggctctggaatggggaatgtggctgaagtgaagggaaggaatttgtgggagggaagcgccagtgggaagtcaaagaagtgggagatgactgtgtaagctgaatcttgggcatttaagtaacacactatttttaaggaaatgactggtacaggcaataaagacccaatacattaaataaatagggggaaaagtggccttattcaaagtctctgagtggatatgaaaaacaaaatacatcaagcctgtagtcccagcactttgggagactgagacgggtagatcacctgaggtcaggagttcaagaccagcatgggcaacatggcaaaattctgtctctactaaaaatacaaaattagccaggtgtggtggccggtgcctgtaatccagctgcttgggagactgaggcaggagaatcgttgaaccacagaggcagaggttgcagtgagccaagatcacactactgcactccagcctagaggacaagagagaaactccatctgaaaaaaaaataaagatgtttgaaaagatcagttttaggggaaaaacaaaacaaaaacaaaaaacaaaaaaaacgcacacagaaaatagaatgaaaacctgaaaacagttttataatttgaagaaaattacaatccatcacattttatgaaacaagatatcaatagtaggttactggaacaatccagtgagatggaaaaggaacttgtgaatgccacagaagtacatttaggaaagaaaatgccatactgaacaagaacaggcagaatcatcaggagagaaaagtaatcaccgacaagaagaagattgataatttttaccacagaattttaacattgccattgtctccactttccagaggaagaaaccaaggcccaaacaagaaaaggagtgaacagcaagtaaatcacagagctctccttcttacctggctaagtatccatttttaattcaagtaaagtagccttaagcttccctgttaaatcacgcggtttggtgttcatgcttctcttaattagtaacattctctagggattatggtgagaatgcaataaactaaaatatgcgaagcacttagaaagcgactcacatagcagtcagtgataaatgatagtggatattatcatttttgttgccattaatttactactattgttattagtgagtctctgttaaaaactctctcttaaaaacccagtttataatcagtaaaatgagaaaacaatgcatatttttggtaaatgagggaataaagcccaccttgaaaaatcgtagtaaagattaagtgtgataatggatgagaatgttctgaaaagcacttaacttgggaggttgaactacttggtaaaatgtttgaatctcatgcagttgaatgtatgctctccttagaataatatttctggattcttcactatgtagtctacacctctctattctgttgtaaaatacaattccaaggcttgaatacaatatttcagaagctgctggcatggacattgcttgcgcttgatctcatctctatttcctactgcagtttcacactacatttagcagccacagcattttggtttcatattgaagtcatgctcaattaaaactacctggtctctttttttttttctcataaacgttttgtctctcttttcctctgcctgatgtttgctaagactattacaaaggaaatcttacagaagcttgtactgaaacatactggacaaattattttcactacataaagtaaattgatgatatgtgaggtgtgtacttgtttttgaccagagttaacacccggttgaaatgtagactctgcttatctttggtgattcctattctgtgttcattcctaatactccatcgacaaagctaagtcatttctcacttgcagctgttaaggccatgtggctacctttctgattcttttccatggactcatctttaccttcactggaagaaacatctcatactaaattgtatacttaaaaataacattagaaactgtacatctaaaagcatcttatgaatggaaagaatatgttttccttaaaatgacttcatagaaggatttaggttattagtaaattaagtctttttattattagaaaatgaaaatatatactgtggaagcattacggtgagtgctgcagtatccatactcagacatctaggttttaatataggttacaccggttactagcctctctgcctcaatttcctcatttgcaatataaggataagaatagcacctcccatttaagattctttatttatttattttttttgagatggagtcttgctctgtcaccaaacctggcatgcaatgggacaatcttggctcactgcaacctccacctcccggggtcaagcgattctcctgcctcagcctcccgagtagctgaaactacaggcatatgccaccatgcctggctaactttttgtattttttttagtagacatggggttttaccgtgttggccaggatggtctcaatctcctgactttgtgatccacccgccttggcctcccaaagtgctgggattacaggcatgagccaccacacttggcctaaaattcttatgataaataaatgatacaaatatccaaaagtgtttatgagtgtgcttaataaacactaaataatgttggttatcattataaaatttatataattattagtgtctgaagtattatgcatgccatagttttatgtgactcaaatattattattttcttcttaatatcactaatttaatattgaaggagaagttttagtaatatttttactggcaatttttaaaataagtaagttcttttgaatgctctgtagagttatggaaagtagcattgcacactctaaggaatatttgtaatttctaggtcagaaagaaattaagggagggcttagtgcccacagttgtccttacataacttctctgtcttctcaacagctttgatcagtcacgcatcaatttgcctttgaaggaagaggaaagagtttgcattttacaatgagaacatatcagcacttatatttaatttacaaagtgaagctttaaatatttttaaatgaaactgagagtaatctgattgaaaaagcatcttctgacatttcactttctgcaaatgcacattcatcgtggtgatggatggcttgcttgaaatgataactaatttggatttcagttggaaagaatactgctaactccactaaaagtatcacttatatgttctctattcctcttctctcatttctttatacattacaaaatacataacattttctgaccagaaactagcattgcttagacaaaaaaattcaattataacataaagtggtggtggtgtggggatggtcgctgaggttttctttctttctttctttcttttttttttttattgagatggagtcttgttctgttgcccaggctggagtgcagtggtgcgatctcagctcactgcaacatcagcctcctggtttcaagcaattctcctgcctcagcctcccgagtagctgggattacagtcgcctaccatgcctgcctactttttttgtatttttagtagacatggggtttcattagttggccaggctggtctcgaactcctgacctcatagtccgcctgccttggcctcccaaagtgttgagattacaggcgtgagccgccacacctggtccagttttcttgattgtggtatttgagtgtacactagaagggtaataggcaaatttatatcccagtcattttgtgagggaatttcaaagcttccctgttattttcagcttgaaatttttcctcacatctaaagtaagaagaacataaaatatattttccctggtgaaaactttccccattctgagtttcagtgaacattgatgtcctcagtagaggctcaataaatacaattaggatgaaagaaatctgaacatgatagaacacctgtaatgagccacgtgaatttgttctcatactaatagatttttctttcctagtgacaatctcagaggatatcctttttttgttcttttttttttttttttttttttgagacggagtctcactctgtcacccacgctggagtgcagtggcgcaatcttggctcactgcaagctccgcttcccgggttcacgccattctcctgcctcagcctcccgagtagctgggactatagatgcccgccaccatgccctgctgattttttatatttttagtagagacggagtttcaccgtgttagccaggatggtctcgatctcctgacctcgtgatctgcccgcctcggcctcccaaagtgctaggattacgggcgtgagccactgcgcctggctctttttttgttcttatctttccttttcttttttaaacagcaaggcctactgctttttctcctagagttttgactttatttagttttgatttattttattagggatataagtgtaagtaattctacagtctctagaatgtatatgatacatagtatttttatagttgatgtctagagtctactttcttgcggtggtttcagcccagtgaatgtaggttactgtcattacagactcatggcatttatgctaagacacagaaggtgtaacatgtatacattactacatggcaagtataatgaatgatattggtacctgtcccactccccatctcccagctgctgtaagagttgactgataacagctcacagattctcccttgtatgaagggttgcccttggccagattggagatacttgcccagaaaactacagcctcccgaaaaccctcctgtagacctgctttgcattggaatacgagactgttctcttgcctccaggtgggactgtcttatctctcagatgctggtgagatcccaagactacaccattgtttagcattcttatattcttcatagctgtgtccctcacatctcttctgctgagagtactccatcagtaagacattgaacaaaattccttatctcaggtcagcctctacaaaacccaacctgagctagcaagtgacacatcctgagttctgatcatggaaatatattctacttaggttcaccatctttctaactttttacattttatttttatttacaatcacatattcatgcagaatgttatactaaattcatactcatattctcattgaatgttaaattaaaatcacaatatttttaaaagataatttttaaacttctttacacatacaatttattttctctgtctctggccaccactctaacactctaaaacaaacaaaatatcatggaatattctaaaaaattaatttctgaagcattaatataaataacttaattaaaaagaaaacatttctaaaacttaaaatctttttttttaatcatagaaagtgggactaaaataatgaagaacatagatctctagtacttatctatcataaaggcataggcttacaacacattctccatatgtggcatttctccattccaagttttacactagaactctaaatcctagaattcaacttgcataccaagaaccacactattgagatgagttccaaaatgggttttgagtagatttgaatcgaagataatggagaaagagacaatcatttttacagtgcaatatcagcattttaaaaattattattgttttttaactttgattttaagttcaggggtgcatgtgcaggtttttacataggtaaatttgtttcatgcaggtttgttgtgcagattatttcatcacccaggtattaagcctcatcccaattagttatttttcctgatcttcttcctccttccaccctccaccctccaccctccaaaagaccccagtgtgtgttattcccctctatatgtccatgtgttctcattttgaagctcactacttataaatgagaacatgtagtatttggttttctgttcctgcattagtttgctaaggataagggcttccagctccatctatattcctgcaaatggcatgatcttattcttttctatcgctgcatagtattccatggttttatgccacattttctttatccagtctatcattgacgggtatttaggttgattcaatgtctttgctattgtgaatttatcttaagcattaagaagggacctatcagcttcagtatgactttgcatttctatggttacatatagatcatggctgtcatattgtactactttaagatatttaatttagaaagaatacaacatgcagcttagtgcatctcttataagtaatagtgatcttagcctgagcttttcaggttctagagctttgcaggaaaaggagactggaaggtttttgcaatatcacctatgcaccatgaattttttaaaaaattatacatttttaatacacaaatcattttttttttgagacggagtcacactctgtcacccaggctggagtgcagtggcacaaccttggctcactgcaacttctgccacttgggttcaagtgattctctggctcagtctctggagtagctgggattacaggtgcctgccatcacaccaagctaatctttttttggattcttagtagagatggggtttcactatattggccagggtcatcttgaattcctgaccttgtgatccacccacctcggcctcccagagtgctgggattacaggcatgagccaccacactcaggcacaaatcattttttatatttgaaagaatatagaatagacaaattgcaaacccgaattctcaatccaaatttgtaagatcttgtacaagtcagcttatatttctgatatttaactttctcgttataaagtgaaggacttactgttaaatgtgcaggagaacacatgcatttaaattcatttcctctcttatctctactaaaatgtcactgaaaaaattaacccatacccaaactccctaacaaaaatgtaattccatgaagacaaagagaataggaaaggagatgaccctctagaaggaatgtgatttaagttttggtagccggaacgctgaggcacaagcagtaaggaagtagacacgagaaagctgtaaatcaggcttgagtgacaaaggtggtgaagtcacccctgcagcaaacttgtacctggacatccagacgtttccatacatcatctgaaatctacatggaggttcccaaacctcaattcttgacttctgtgcacctgcaggctcaacaccacatggaaggtgctaatggttggggcttgcaccctctaaaaccactgcaagagctgtaccttggttgcttttagccatggctagagtggctaggttgcagggcaccaagtccctaggcagcacacagcagaggggccttgggcctagcccatgaaaccggtttttcctcctaggcctccaggcctgtgatggggggtggctgccatagaggtctctgaccgtgccctggagacattattccccattgtcttggcaaatcacatttggctcctcgttctgtatgcaaatttctccagtagtctcaaatttcttccagaaaatgggtttttcttttctattgcctcgtcaggctgcaaattttttcaacttttatattctgtttcccttttaaaactgaattcttttaacagcatccaagtcacctcttgaatgctttgctgcttataaatttcttccaccggatatcctatgtcatctcccttaagttcaaaactccacaaatctctagggcaggagcaaaatgccaccaatctctttgctaaaacagcaagagtcacctttgcttcagttcccaacaagttcctcatctccatctgagaccacctctgcctggatttcattttctatgccattatcagcgttttggtcaaagacattcaacaagcctctaggaatttccaaactttcctacatatccctgtcttcttctccaccctccaaactgttccaatttctgtgtgttacccagttccaaaattgtttccacatttttggggtatttttgtagcagcaccccactgtaccagtaccaatttactgtattcatctgttttcttgctgctgatgaagacatacccgagattagataatttataaagaaaaagaggtttaatggactcagttccatgtggctggggaggcctcacaatcacagtggaaggcaaaaggcatgtcttacatggtggcagacaagagagaatgagagaaccaggtgaaaaggatttccccttataaaaccatcatatctcgtgagacttattcactacaacagtgtaggacaaactgcccccatgattcaattatctcccaccggctccctcccacaacacaaatcaagatgagatttgggtgagacacagccaaacgatatcactctctcatcagaaaactctagaggttaaatgtggcatgaaacaaagtaatgagcctctttcctccttcctctcactccaagagttgtagtatcacctggcaggtaggtcaggacatccattctggctagggtctacatttggtgaccacatcatcttaaggtctggaaggctgctcctagtgggggactccatgtaaagaaaagtaggatttctggttattatcattataaactaaaaacaattaggaaatttcaggcaaagactatagaaattactacactcatgtaatagtcttgtataaatcctacatttaagcaaaattaagaaagacctgtctttgaatgatatcagaagactgtgataataattaattaagtgtgttatttaattagtctttaaatatattttaacaatacattttagataaaaacagagaccatgacctgcacccatgtgtagactgggccccagtgggatactttttgatcctcttcccaacccctagacttcccctgtacctatggttcactggatgccccaaggatacctgatactcatgtttacaatgttgtccctgggctacgtttccaggctagatccagaagggtggtttggagaatagttcattttcctgggtagtgtggccagtgtggctggcaaagaatttcttcctgggatcacatgagattcatcactgggatgatactgacacactgatttggggtgactctcacctaagtcagaatctggaaatggtcaggattctgatctaccagtggttcaattctgagcctggaacatgagccacatgtgtgagctgtgatttagctctgatccatcagtgttccaaccacattgctgtctgtggcctatagaataagaggggtgcaagggtagcagtaggcatcatttaccttgtgcctctccccatctgctactgaaactcagggaggttacctcaacccttactgcaaatgccttttcggtgtcagtcttcctgccagggatggctgtgtttgtttcttctaaaggctccaaggagaatccaaatgtaaaattttgctttatgacttaagtgttatttaacacaatgaataatgcatttataaaatatatccactagaaacttggctgtctgggaatgtgtatgaataaaaattaacctaaggatataaacaagtgactgtgttgtatttacttattataataaaactctaggaaaaataactatctcatcctcagttaagttcatcaaatactgagattccattatgagcagggaaatttgtggatataaggactaagcatattaataacaggttctgtcctcaggaaacatcatcttggaggaatacagaccgtaaacataattttattgtaatggcaacactctgtatataatggtatgaatggatacactgagcccagaaaacagcagccacatcagatctttctagtgaatgttttcctaattgagtcttcgtaagagtttgctatgtgaaaaagtgtggaataaatgtggcagtcaaagggaagtacataggaatattgtttagctatttctatgtaacagaccacccaacttagtccttaaaacatcagctctttgtggttgctctcaattatgtagacctcaattcattttattgacaatttccatttggaaatttagacttggcttagctttctgatccttctgttcttaactgaactaccacatgcatttacagagttctgggcagctctgcctctgaggagttggctagcttttcactgagggaaggggatggtaaaggagactcagcctcatgtttgtcaacattaggggactgtcccaagtttgttcacataaaggcttggcaagaatttaagagggataatggaatcaaagcctattcaaggctaggcttggtataatgccactttcacatgttgaccaaagcatcggctacaggcagtcatgaggtcagcctagattcagggatgacaaagagatctacctcttaatcaaaggaactgcaaagtctcattaaaaagtggcatgcattcagggaaaggtgggaacatgtggcatgtatttatttatccatttgtttatttaatgcatttaaccacaacacataaagtttctaagcataagataattttgtgtaaaattaattaactttattaatacaattgaacttttattataaactaaacctttaagtggaatataaagtaggaaattagaaaagatgaagctggagaggtaacaatcctgaaaaagaagggttaacttaacaagatgtgacattttttgtagattatagtatttcccaccaaattcagacatgcagagatctcctgcagaataagctagagatacatacacatacacacacacacacacacacacacacacacacacacacagaattatttgctcgaagacaacagggaaaaacgacttcatactttacccactactcttagaaatttccaagataaatcaatataatacaatatactaaaggtgtcaaaaagtccttcaaaaaagagaaatctttattttcataacaaaacagttatgcttattaaaacaaagactttttcttttccttttcaccaaatactaatattgaaaggtgaataatgcttttgaagagaaagtaaaatattttaatcaggttgttacaggtaagatttttactttagagagattaccctggcagtgggctggatgaaagattaaaaaatgattaaaacctgcaagatgagaaatagatgactattgtgattatctaaagagaaaaaaacaaatttccaatctctgacattgattgcaagaataaagaaaggacaaacagattttaataaaacataactcagtcatagattggatgtggggcatgagaaagagtagaattttgaatgacaatcaagtttctaaattgagagattaatgttatcactaagacaaggaacaggaatacctttgattttcttttgtccactacacatgtgtttttccccactctcagactcatgatgaaatatgaaaggagatttagattctgcccaactagaactcatattcaaactaaaagtagaaactgatcaaagagtttgttgtttgggagcaagattaagaaggaggtaggtatggtgagaaagggaatttcttaaagtcatcttataatatttagtttctttcctacacaagtattaacatgaatttttttttttgaaacggagcctcactccgtcgcccaggatggagtgcagtggcgcaatctcagctcactgcaacctctgcctcctgggtacaagcgattctcttgcctcagcctcctgagtatctgggactacaggtgtgtgccaccacacccggctaattttgtatttttagtaaaggcagagtttcactatgttgaccaggctgttctcgaactcctgacctcgtgatcctcctgcctcggcctcctgaaaattttcatataaaataaaagaacaaaggaaaagtctttctgtttcattcaaccatgactttatttaacatcattgtaattaaatacatattaaatttttagacaatgaataagaaatacattacctagaagcaagtttgcttgtgtctggaaattattttaaaacatgtccaggtttacgtaggaatctatagccaaagcaacttttgtggcacatactttaggatagatttgaagatgtgtgaccaagtagagaataaatactatatgggataaagtagatgtgctattttatgtcctggatctgagaaaacaaattatggaggggaaagaaaaacactttcaaatttattgacgtaatacacattttccaagagtttgtttcactgatgttccacatttcaaagactaaatgcaaaatgttttctaatgtataaaattcatttaactgatataaattttttcatattaatatctgtgcaaaaatgcagtatacattattttatttgtagggagatcttctctgttcattttcaggtaataatgtcaataatgccctaataccagggttttgtattattttatatatcaatatcgatatcaatacaaaggatcttgatattattgactcactggtttaatagtttctaaaaataggtatttccagaaatgcaccttattgcatacactatacacatttgtgtgcaggtccacatataggcatatgttgattagatataataaccagaaactacttgcttgaaggcaaaaatttttatgtcatccctttcttaaaacagttttctgatacaactttgggcttcactgacaacctagagttattcttttttacacaactgactaacaaaatggtttcaagtttatttaatatataactgtaagtaattcagagactcctgggataaagcaagtggaattcagtgcaaaagaataatatggtagattattagcttgtaagtaacaaaaatcaggatatatgcctctgagttaaaaaaaatcagtttgatgtctgatcacgaggcaatgacattgctggtttccacagcaaccaaatcctgagtattcttcattcatctcttttctaccagaatccacctcattacggtaaaaagaaattcagtgtcacatcaatgaaaactctaatatttatagatccaaatacattttttctgtccagggtgactaagtaaagatgctaaaatccagcattggcttgaacaagaaaagttaatttcaaagtgagaagaactgaagctttcttgaattttacttatgtatgcagcatttattatttgagcattcgagagagatgtttttttcatctactttgacaggctcagctctttggagagtttattttatctcccctagtcagaagttgatttccgtggcacttctgcctcaaacttaaaagtcaaaatacaaaagaactagcacacttattcttgtctagcaaagataagatttattctgtgtggtgtaaaaacacctgacaaactatctacttgatactgaatttgcaaaatactttcataccacatttttgaatgggaaaatatgataacataattgactatgagttgtgtttcctgtgattatgtataaaaatatatacattttagtatagctatattacacaatttgacagcactgccgttttgattgatccattgatggatttttttatcgcaagttgcaaagtaattattttattttagaagcacaattcaaatctctctagctttgtcatatactagtcacacagttcaaatatatggttttggtgcacttatcttgtacagtgtatcacattctgtgcatattctatttcactggtgtatttccataggactctctacagttttttgcataaacacttaaataattcttttctctggttgttgatctaatatctttaatcctcagaatactgcaggtttcatgcaggaaacaagtctcctgttttatgctggatctcagtactcaacatagaggctggaacacaagagaggtcaatacattttaatgaatgaaagaatgaataatgagccaaaaatttactgtttctattacttgttaattttataaccaaattccaatggctctattatcattattgcctttagatttacagtgcataagcattgcattttgtgtaaagtcatagggaaatgggtatacacagctaaataagagtatccatcatgtccatgacttgctactgtttatagatataacacaatacataatatatcacagaactgacgggccggaagaaaaaatgtaaacttatcttgaaattaacatttttagcaaagaaaagagagaaccaagaaaccaaagtaagagaatatagagagcaaaagtaacagcatattttcttctagttttctcccatgaaggctaggaattttaagtcgagttcataattgactttgcatcaagcaattagttgaatagatatcatagacaggtgctttgtatgatgcttagagatgatattagtccattttcacactactattaagatgctacctgagcctgggtaagttataaagaaaagaagtttaattgacttacagttccgcatggctggggaggcctcaggtaatttacaatcctggtggaagacaaaggggaagcaggtaccttcttcacaaggtgacaggagagagagagcaagagagaaagaaagtgccacactttaaaaccatcagctctcctgagaactcactcactattgcaagaacagcatgggagaaactgcctccatgattcaatcacctcccaccaggtccctcccttgacacatggagattacaatttgaggtgagatttgggtggagacacagagcccaatcatatcagagactatttatttattcagtataaaacatcagctatgtagcagcatttttccagttactttgcttacagcagtaaacaaacaaattctccattctcaagattactttttagtgggattaaataccataaatcttaaaactttttaaaggaaatatacagaacaattagactagtagagaataaaaggaatgggagatattttataaagggtcatcaaaaaagcatcactgataagatacaatttgagcagagatctcaggaggtatagcattgaaataggcaggcatctaaggaaaaagcccagagagaaaaaataacaaacaatgaggtcaaagtatgcttagcacgttaaggaaatagtgacagagtccaagagcctgtatgacttgtacagagtgaggcaaggggagaatattaggatatgagatcacagatataatggggaatctaatcatcaaggccttgtaggtcgtggttggaaattcaggttttgactctgagtgagatgaaagctgttggctggttttgaacagaggagtgatatgttctgattgacagtttaataggataattttagtgctctctgggaagtaggttttatgagggcaaaggtggaagggagaccatccaacacgctattgtaataatccagttgagagattattgtgtttgggctagggtggtagtagaccaaaggtggaaatgcgttagactctggacatattttaaagataaaatgaagagtatttgctcatagattggatgggagatgtgaaggaaaaagtagagacaagaatgagtcatggtcctagctctagaaaatgaaagatgaagtttccattaactcatgaggaaaaagtagtaagtgtgagggccatagcacacatcttaaattcgtttttgttactgctaaatttgagatgctcatacatttaagtcaaaatgccaaaggagtatttttctatgttttatcaaatgatgagaggaacaaggatagaagagtagaattcagagtttgagtttggttttggatataggatcctgaattctgggaagtaaggaaatgttgattttaaaaaagttaaagccacagtggcaaataaaaatggagccacagctatgccacacttcttcactcaacataaattgatgaagggcagtcataggatgaagatgtgctgtcacacagtcatttatccaagaactgattgtgaatttacaaatctatcatccatcgtttttacttttctttctttttttatgggatatgactgttaataattcatgcattcaacatacattcaggttctaattgcctgatagttactcaacagtctgaacctcttgaatgcaggagatttaacaagacagatagatatggattcttacaaaacttttaactttctattggagactataaacaaatagtcattataaatggctgtacattttatgatagaaaaataaagtcttaggaaagaatccatagcatctatgtactccatctaggaaaaaaatcttccgaaacaagtagctcttaaattaaactttatcctcttattcccttatgatttgaaaaaattctactgtctcttttattaccccttccaagcttatcaaaatttgagaatgtaagaaatcttatctaaattgaatttaaaagaaattacaaattcatctttattactttttttaattgcaaacaaaatgtcactgtagtgttatcttgttcagcgagaattttttttacgttgttatggactgaatgtttgtgatcccttccccaatttcatatgttgaaaccctacccttcaatgtgatggtaaaaggaggtggggcctacaggaagtaattaggatcagatgaggtcatgagctcaggatcctcgtgaatgggattagtattcttataagagtgctgagagagctgcttttcaccatgttaggatacagtgagaagaccaagttctgtaacctgaaagaagggtctctccaaaacctgaacgtgctggtaccctgatcctggacttctaacctacagaactggaaaaaaaaattctattgcttaaaagccatgtaatctatggtatttttgtttatagaaatgtaaaacaagacagaaaactggcaatgagaagtgagggtgctgctgtaaaaaaatatctaaaaatgtggatgtgcttttggactaggtatggctagaggctggagatattttaaggtgcatgctaaaagaaggtctacattgccatgaaggaaggaagtttcctgagttgtagaaaatttatatctcaaaggggcaaagaaagaatttaaattgaaaatttcctgaagtaaagctctcaggaaaaggtagtcaggagcctataatcatgtttttgctggaacaaacactaaatactttaggcagttaggcttttttaggcaggcgcgttaaggagtatacggtcattctaaaggaatgagcttgggccaatagaagtcaccctagagtttggtcaagtctgttaatgcagggtgtggagaatgagtgtggacaatcatttatgctgagaattttgtggttctcatggattgtttttgagataattaacttcattacaatattgaattttctcatgcatgaacatggaatacctatttatataattgttctttaatttgacttagttatggggttttttttagtttttagcatactgtttgtgaaattatcttactaaatgtaactttatacattttgtttcattgctattttgtttcaatttctatttttttgtttctaatacattagcaataaagttgattattttattctaacctaatatccatttactgtggaatcttcgtaaacttaatttttagttgttacacctttttagttaaatacctttggattttctatatgcataaccaggttatctctgaattatgatagttctaatttgtttctactctgtaagctttttattttcatttctttccttatagtactgaatcagacccaatgcataatattgcctaaaagtgataaggatggacaaccttaacttgttctcaaacttacgggaaaagcattcagtcttttatggttaaaaatgatctcagctctggagcttttcataattttttcccaggttgagcatgtttccttctacttttagtttgctaagaactgttttcattaaagaatctataaaataatcttacggctttgcacattaatttgttcatatgattattcaaaaaactgaatattttaaaatgctaaaccaaccttgccttcccggaataaactgtacattatcatgatgcattattctttttaaattattggagttgaattactgctgtttttcgtttttttttgtttgtttgtttgttttttgagatggagtcttgctctgtcgcccaggctggagtgcaatggtgcgatctcaggctgttgttttaaataaagaattagttctctctgtgtaactgtttttgagtgtgacatttgctttcttgtgaacttagaaagaaaattacaccatttgttctcctgggtttctggcttgcagacagctaattatgagacttctcagcctccataattgcatgagcaagatctttataattagtctatctatttatcataattgcatgagcaagatctttataattagtctttctatgtaatatatatatacttagacaaatatatatatatatttgtttacatttgagtttaatgagtttaagtctagaccctatattttatggggttcagaagcggaaatctgccatcttaaattttgtttttccacagtattccctacggtgcccttcacactgatgtatgaactcaagacaggcccacttctctgcagaagaatgtcctaatatcaagtaaataagtattctctattatatatatatataaaatataatatataaatttgataaaatatataataattaattaattatataatagaaggctgtgattggacccccaatggtaatccaacatccaccaaaaatatttatgtaatagaaaaattttaaaggtgacatttgacgtttcgattatatatttaagaatacattatgatgttttgatatacatacgtagttaactgattacaaaagtcaagtaaattaacctacttatcagctcacatagttacctttctcttcttttgtgtggtgagaatatctaaaatccattcttttagcaaattaacagtacgcaatacaatattattaactgtagtccttgcactgtacattagatctctattgagtgatggatatcttcatggggtggtgattttatttcttttggttgtataaccagagtaaccagaagaaggattgctggatcatatagtagttctactttaaatttatttatagaaacctccatataatggcaacatgaacctacatttccaacaacaatgtacatgagttctttttactgcataccctcactgacatttgttatttcttgcctttttttatagtagtaattctaaaaagtgtgaggtgatatctcattgtggcttttgatttgcatttccctgttgaatccctgatgttgaacatctttttgtgtatctgtttgccatttctatgtcttcagagaaatgtcccttcagattgttagcctttggttatttgctgtggagctgtgtgagttacttacactttttggacattaatccgttatctgatatatggtttacaggtatcttctcttactctgtgggctgccttttcactttattgattatttcctttgctgtaaaaagaaaaccgtttagtttgatgtagtctaacttgtttactcttgctttgttgcctgtgcttttagggtcatttggggatcaaaaattgttgccaaggccaacaccaaggagcttttttcctatgttttcttctaggaattttaaggtttcaagtcttaggtttatatctttaatccattttgagttaatttttgtatatggataagataagtattcagtttcattcttttcatatagatatccagtttttccaacacaatttttcaataagagatgttttcatccattgtgtcttcttagtggctttattgaagattaactgaccatatacacttgagtttgtttctgggctccctattctgtttcattgttctatgtatttgtttttatgccagtgccatactgtttttattactattgttttgtggtataatttaaaatcataatgtgtgatgcttccaactgtttctttatcaagataactgacttttgtgcctctacaatatagataatctaacttaactctaacttgctataaatgtaccaatcagccaatcttcaaggtcttgatcaataatgtggtttaaattattgcacctcactttctacaaaaacataaatatgacattacattgatgacattcttctccaaggaggttcacttgccacactcattcaggacatacaaaatactcaaaatggatctaacaaaaaagacattaaccgttgtcccattatcagtaaatacctctttaccctcttaacaccacttaacattgtgaatgctaacaaggtcaacaggtatttcttgacgacaggacaattgttgatcttttttttctcaattgattttgtgcttctacaacagaagttatatcaattaactcctaacaagtgctaagatgtaccaattggcaaacattcagtggatactgagattcaaattaccagagccaataaatatttatatactctcttggtgcatgtgtgacatcatcagccttgacttgtgaattaattttgagtagcaggaattgatcctgcctcatgaatatagccacaaggtacattgtgaagtgtctgaattgctatattcctttaaagagcattgaagtttgtttttgtgtgcaatgaatttatttgcttaccagtgtaaccatttggaagctttgtgccatgctttgttttactgtttcaataaaactttactttgtatagttttgcacttctaccaagctggtacccttctagtttctctattaaatgccctggataaaccataaggatggagctcaaatatctacatgctctctgtaacctttgggaattactcaactcatagtttccttgtcatttttgcctgaccttatagaatttcaccatacacacagagaacttagtgtccaacaaagatacaagaggacctctatgaagatatccgaaacattttctgggtacatttaatctttccagaacttcttcctccaaagttcatacactacagccttcctaaacttttatttctgtcatctcaaccaaatatattagtagactctctctgagatcactgttttagtctaaggccataccacccaaatgtgcctgatctcatttgagaacattgttttgtgctccaggagccaaaaatatgtctgcaggcagacatctgagaaagctgtagtgccttccaaactcatttccttctcttgaggttcacagaaagaaccttgttatctacagactgaaacctattactttatatattttgttttgatgttttgtttgtttgcatttgagtttaatgagtttaagtctagaccctatattttatggtgctcagaagcagaaatctaccatcttaaattttgtttttccacagtattccctactgtgcccttcacactgatgtatgaactcaagacaggcccacttctctgccgaagaatgtcctaataccaagtaaataagtattctctgaacagagcttggaaaggagcttgggaaagagctaagttgtatcagaatcactcaaataggaattaaaaatatttctaacaatgtaaacaatatatgtaagcctaacaaattcaattaacaagtattggatgtatccttgtgccaaaaatactataaagacaatgagcaaagtaatggtgaaataccgtctggtttacacacacacacatacacacgaaaacatacacacacacgtatataaactgaattttacatattacaaaaaaaatccaggattataaaagtttcagctactgcttttaaattgattttgttttgcatttaaaaacaagaactaaaaaggaatataaaaatggaggggaggggaggcggtgacattctaagtggaacgaaaatgttgccagacccttttctcagcaattctttcatctggatcagtagatgcaatctgagtaggaaaacagctttcatttgccagttattttcatcacctagctgttggtataaattatttaacaattcagttgtgtgcatgctgagcatggtgtataaactagtctgcctgattcatatttgtgaagtgtatgccatgcatttgaggttgttgcaaaataatatttcaaaagttcaatatgcacattaaaataaactcaactcataggaaaagtgtgcaaatatttgatatcattaaaatctctgtagttactgtttttaagaataaaatgttacatatgatatgtataattttaaattacaggcatgctttattttattgcagtttactttattgtatttatcagatactgtgttttttacaaatccaacgtttgtgacaaccctgcatcaaacaagttgaagagcaccatttttccaacggcatgtgcttatttcatgtctctctgctacattttactatgtattgcaatatttcaaactttttcattactattatgtcttttatggtgatctgtgatcagtgatcttagctcttcctaatgtaattgttttggggagccatgaaatatgctcatataagatggcaaatttaacttataaatgctgtgtgtgttttgacttctccagtaattgactgtttccctatctctttccctctcctcagaactgcaaattccatgaggcacaacaatattaaaattagatcagttaataaccctacattggtctccaagtgttcaagggaaaggaagagtcatacatctctcactctaaatcaaaagctagaaatgactgaagcttagtgaggaaggcatgccaaaaacttaggccaaaagctatgccttttgtgtcaaacagccaagttgtaaatacaaagaaaaatttcttgaaagaaaataaatgtgctaatgtagtgaagacagaaatagtaaaataaaaaaatagctttattgttgatatggaaaattagttttaggtgtctggataggagattaaaccagccacaacattcccataaactcaaacctaatctggagaaagaccctaactctcttcaattctgtgtcttccagagaggtgagaaagcttccgaagaaaggttggaagctagcagaggctggttcttaaattttaagaaaataaatgatttctataatataaagtataagatgaattagcaaatgctggtagagaagctctacagcaagttatccaagcaatctagctaagatattttatgacggcagctacactaaacaacagatatttaatgtggacaaaacagccttctatgggaagaagatgccatctaggactttctagcttatctaaaagataagtggatgcctggatttaatgcttaaaaaaacagactgactctttagttaggggctaattcagccaatgctcatttaccattctgaaaaatcctagggcccttaggaattatgctaaaatatactctctctgtgtttattaaatagaacaaagcctgatgacagtacgtttgtttacaacgtgatttactaattattttaagcccattgttgaggtctactgctcagaaaaaaatattcctttcaaaatattactgtgcactgacaatgtacctggtcacccagaaactgtgatggagatgcacaaggagattaattttgttttcatgcctactaataaaacctccattctatagcccatggattaagaaataatgtcagatttcaagtctttaagtataaaattgtttaaaacttaatttttaaaaattcttttaacttttattttaagttcagggttaagtacaggtttgtaacatagctaaacttatgccataggaacttgttgtacagattatttcatcacccaggtattaagcctacccattagttacttttcctgatcctcttccacctcccagcttccacccgctgaaaggccccagtgtatgtttttcccctccctctatgtgtccatgtgttctcattatttagctcccacttataagtaagaacatgcagtatttagtttttcattcctttgttagtttgctaaggataatggtatccagctccatccatgtccctgcaaaggacatgatctcattctttttcatggctatgtagtattccatagtgtatatgtcttattatttaaagaacacattttgtaacgctgtagctgccatagacagtaattcttttaatggatctgagaaaagtaaatttaaagccttctggaaaaaattcaccattctagatgttattaataacattcatgattcatgaaaggaggtccaaatatcaacattaataggaatttggaagaagttgattccaaacctcatgaatgactttgaagggttcaagacttcagaggaggaagcaactgcagatgtggtaaaaatagcaagagaactagaattagacatagagcctgggctggcacagtggctcacacctataatcccagcactttgggagacagagatgggctgatttcttgaggtcaggagttcaagactagcctgggcaacatagcaagacaaaaaatataaaagctatctacacgtggtggcacacacctggaattccagctactcaggggggctgaggtgggagaatcacttgaacccgggaggcagaggttgcagtgaccagagattgcacctttgcactccagcctgggcgaatacgtttggcgtggtgttgaggcatcttaagtaacagtgaacattgatcacgtcaatacatttttaaaatatttccactagtagccgtgtgaaagatgaactgagaatggagaaggagatgtaactgggagctgaaagcccagaatggaaagatcaattggaagatcgatacagtaagtccagcaagaaatcatataatcttaaccaaagcaatggcactggagaaggaaaactaaaaagatttcagaaatatttaaaaggaagaatgcaaaaaaatggttactacaatgaaataaatataagaaataagccaggaaaagtaaaagccacgtagccacatgacttgtcatgtcataaaatcaatttaccagatttcaaagtcgtgcctaatatgaagcacaatttgaatgtgtccttttctttcccctatttttttatccagctaaatctcattcacagtttgggtcttagtgcaaacattacatctgtatggaaattttgtttaaatacaatggcctgtattaggtccacatttatttgtttccatattacctttctccaactataatcatagtatcatgtatatttttcaattttgttgttcttcactggaatgtaagatccatgaataaagggtctttgtctatatcaattcacttagaccccctagttgctaacatggcaatttaagcagtataatcatgataaatatttataaaagaaataactaataaactaagaaattagaaaaaacaatcctgaatattgtagatgtataaatactatgaattatgcttttaaatgtaagaggcaaaatctacatttcctgtgacttaaatctgaataataaattcctgcaatttataccttgggggcaatcctaaaaggacattttggactgctatggccatgatatatgtgatttctttaatcatgtctcccctgtgagttatattacttgctttaaagagtgtgggggcagccattttgcttctcagagcagttcaagtgttagttttgatatgtagcttagtccttagctatctttaagatcatttttcttcacatatgcagctataacctttgagaattttgagtgtttctaatctaatattccttgaattagagagctgagagctgaatgagaagtattcaaggagaaagatgcttaccataatatgattcttagttcaaaaattcattcatccatagctttaaaaagacccaatacactgaccttcaggtcaggggaacaagtcacattttattgagaaggacgatttgagcctataaaaatgtcctgtagtttatcatttctctttaaagaaataatagctttaaagtgtagtaactgtggacccaaaggaaacatttttttggatcattttaccataacattttttaaaaggcccagagagtaatggaaagtagataaccccccctccccatatctgtctattgaataaataggcaaacctagcctgcttctttatgtagcaaatcattataagtctgatcagctttcactggcataactgctaagaaatatggtctatttctttctttgtagctttgaagccacaaaggaatttatttctttatcaattttaactatgttaataagacaaaataagcaaagtaacaacattataaatttattttgaaagtgttaagtaagatatccagatatttagatatttaaaagcacctggattaaaaacaaacaaaaaacattatgtgtgttattttcatgggaatatacagaattagcatttgaaagacatggccctaatcctgattttgtttgttcctgcctgttaaatgggtaaaataaaatcagtcccactttttttctgtgtataataagagaagtatattagatgtgtctactcaatcaatttcttagtcataagaaacaaaacctattctaatttgttaacaaaaaaggaaacatatagaaggatattatgtaatataccttatcaccatgaagtcatgagaattatagagcctccctagctgggaataatactccattgccactacaagaacatcattgctactgggaaccaaatggcaccatttctgtctctgccactgctgtgtctgaaagaggcacatcggctgggccgtggctcattgctgtaataccagcactttgggaagctaaggtgagaggattgcttgagcccaggagttcaagacgagccatggtaacatagcgagattctgactctacaaaataataattttttaaaacagaaaaaggagagtttcttcccccacttttaccagaatgagctccactgttgcttctgactcaaaatctcactcactgatgagattacagaagccagttcacacacctgtgaaatatgcaaagtaattttctggcctgtattttgggaaggcatggactcagctcgttatttctacaaatatataaagggtgttagaaagttttggtggctacaaaacacaaagtcaagcttcactgtatacccttagtcctaaaattatggatatctattaatatataagggatgtaatttacaggtaattaaaattttcactttgcatggagctattttgacatcatagaaacgcaattttgatcaactacgctagctaggaattcgacatataaagaggtttttgtgccacccaatagattttgctacctcaagttatgacagtgccagtgcaattaattgaatggataaatggtcaaccagttgttctgtcaaatgcttcctccagccaatttaagtaaaagacaaaggcagatagttatttattgaatgataaagacagaaattttaattatacttaaagctaggggtaaaaaaattttgataaatatccagaaccccagagctgcataaagaatcacaagataaaattactttttagattttgatagtttctagtttgttttttaatttttacacatttttgcatgttaggtaatctataaacatttttatgttttttaactaggatactttaattagtatagtgaataaaatgtaaaattatgagattaatttgagtctagttggcaaaattagattttttttcctattccatggaaatatttacagttgttctaaaaccacaaagtaaattgtatttagaattttcctgtgcatatcagctgcatttttactagagttgtgtgtcactcagttggtataaatttgggtccctgtgggtgcccagctgttcttctcttgttgtatatcttgcagattgtatctgagcatggaacttctttgaagctaacattaatctcatgctaggacctgtttaaaggtgtgtgcacttctttccctcctctctacatcacaccactcttatgcctatagttttattttatattaatttccagaaatattcctggagcaaaaataaagcccataaggcctgtatatgtagtcttttagtcaatctaaaaacgtatcattttaaagaatatctagctcataatttaatattacagattgattgaatcagtttgcaaataaactttaaaattatttatatacacacacacatatatatatttcagataaaagaaataactacatcattggttatattcataattttaaaaaaaatttaatggagatgggggtcttgctatgttgcccaacctggtctcaaacttctggcctcaagcaatcctcccacctcagcctcccaaagtgctgggattccagacataagccacccacacctggcctatattcataatttgccttactccttttatgtatttatattgcaggtaaatgaaataattgcattattggtcatgttcatactttatcttattgcttttatatatttatatttcaaataaatttaataattaaatcactggtcatattcataccttgtcttacttctcatttcagcgattatgctgaattcaattgtcattaaacatgaatcttgggtcccaattctgacagccccaacaagaccataagaaggaggaagtggcacttaagtaatgcttaaccaaataagcaaacaaacaaacagaaacaaatatccaatacgtaacttctttagatatcctttctttatttaactgttgccttctttatttctttttcttttcttttctttcttttttttttttttttttgagatagagtcttgctctcttgcccaggctggagtgcaatggggcaatctcagctcactgcaaccaacctctgtcttccgggttcaagctattctgtctcagtctcccaagcagctgggattacaggcacatgccaccatacccagctaatttttgcatttttagtagagatggggtttcactatgttgaccaggctggtctcgaactcctgacctcaggtgatccacctgcctcagcctcctaaaatgctgggataacaggtgtgagccactgtgcccggttgccttctttatttctttgtagtaatcagtgaaaaaatctttgatgttttatttcaggatgtgagagagattgtaccctagtaatgtagtaaattttgaagagataggagccctaagaaaaggtacagaatgaggtacgcctgcaaaggagatgaaaacaggtagcatccttgggtctataaaggaaatggaatgaaaagaagtattacaagatgccatcccgagatagggaaatgaaaccagacaataataagcacaccaagttagccttataagagacctagtccacttccaaatgtttccaagcatgtacaattatcattgttatgcaatctcttcaaaaagtgcttttatacacaataaaatgtggccaaatatgcctgcaaaaatatactgttttgtataagaaatattttgaactaaagacatttgaaaaacaacagatgcaagaagggcattctaatttccccgttgcttcttgaaaacagatgaaatttcccatgtgaaagatgcccttcctgtattaggagaaaacattcttcaaggggaagtcatggtcaagagacttcggcacaatcaaactttgttaagataattcctcttttcctttatcctccccacataatttagttaattttcaacagttgcatctctttattccatataatataaaatctcttgggttttgccacttttttggatcttcattctcttgtgagtggttctatgtcatgtaaacatatattaaacgtggatgtttttctcctcttatctctcttatatgtcaatttaattctcaggcccggccaagaactttaagagagtaagtatcaatgtgttataggctcagtttatgattttccattccttcctttaaacatgttaagtttagcctacacctgcctccttacatattttaagtttggcttaaaggtttctctgtatttagtgaactgtaacttaactggatgtataaacagactgtaactttctcttgggccaatcgccatgtttcagctgatcagaggctcaaattgtgttcaaataaggcaaagctgagcagtaagcagtctggctgtctctgttttgtgtatgtcagttttctttttctattcataattcttcaaccatgtggaaaccctggagtctctttgaacctattctggataaggacctgctcaattctccaatcattttttgctcagttaaactctgtgaaacctaattcgtctaaggtttttcttttaaaaaacttaagatttagttttcctggtttgaaattgagtgttgagaaaatatttttgcgtgtctgcacagtcatggctttctcaaaacattttcctgaaaaagtggaatcttggtcttatagccagacttgcaagttaatttgcagctgtattcatagtgaaagaactccttggaaatttagctaactccaaagatatttgtttatatttcaagggcaaatgaggcccattactttggagacaaatctggctgcagatactggacttatcagccctttggaaaatttattttcttaccaaaggagtggagtaaggatctattctctgtacttttccaagaagcactctcagaaaatgaggagatagaatagtctttttgtcttctaaaagcaaagaacaattcattttttattatttttctcttgcataagaaggatctgaccatttacataagagatttgttcatttggctttcctcatatcatactaaacataaaaattaaggcagaaaggaccaatagttattaaaatgtaaataataataattaatctggttctagcccagaacactttatgttgacattcactataacattaatattgatgaatattaataacacaatgtgttgggaagaggagtgtcagaaattcttgccacattcaaaagtttcagctgtaggatagttcttattaatagaggatttaataaaagttgcaatggaataaattgttttgatagtaaagcaaagaaacaaaaaaagataaaggtacaggaagcaaactttatcatataaattaataatttatttcttcattgtattagaggttaatatccaggaatggacaagctttagaaaggttgggggagaaactggagggtgaactcaggtcagatggagacacatcatgtgtgcactaataaaggcttcaaatttttaagataataagtgttaatatataatagagataataataataaatagcaaataatgttagtgacaggaggtaatcaaatgcctaggcagatagaggtgggtccctggtgaaacaccaccttcaagccaaagacagtttaaagcctgaaaaccaagccacaagtctcggatgaatctctagactacattgggaacctctcttccagtttggtgagctttcctcaatttgatccccatccttcacctattttacatatacctacctgtctctaattggtttttaacactatcatgtcctcctttgagtggtgtctttcttgcatactcacagaacaatcagcacacactctctcattatgagcccataaaagccccagactcagccatacttggagagagactagctgcctttgatcaagggaccacctgcttctccactgtgagctgttctgtcactcaataaaactcttctctgcccttctcacctttcaattgtcagtgtaacctcattctttttggacacaggacaagaacttgagacccatcgagtgcaggtacaaaaaaggctgtaacactgtggctctctgtcctctgccagaacccagcagccactccacatgatgggaagcagcagtggttccaggccaatcctggagtcgtgggccagagtggagcagtgggactgaaagagcagttagcatgttgtaacacccactttggggctttgaggtcactggcatccctgttcgggtgctgctgtgttccccttgtctggatgccagcatcccccatgggagttgcttgtggcatgcctgatccagccacaagtcctgcacagagcccactcctatgccagtgcttggagtggccgactggaccctgcactcacatgctcacacacccactaccaccacaggctgagcgcacagttgtagtggccacaggatccatgctggagcgcaagatgggcacagtctggggggccgagtcagcaaggcacctcttgtggcaagccacggcctgagtgagtcctgagcggacacgttgccagccacattggcctccagctgacaaagcagcaccaaaaagaaatcctgcaccaataataaagatactaaggactttttaaaaaaacttttgagttaatatttatgattcaaatatatagaactaataatacaataaatactaacatatttttacaccagtttgcaaaaaggtagtaaagtgaaaattctgccatttttcagagaacaacaatgttaaatatacagatttatctcctaatccatcaacttccttcccccatcttgtcacaaaactactagtctaagtctgatgtttacatttcttatgcgtttcactaactgtactaaatatatgggtcaaaaccaatatagagtataggttttaaatgtaaaattaattggtgatattttatggaaaatttcttttgtaatttgcttttctactcaaattagacttttggtttgttttgtttgttcaaatatcgaaatgatctaagtttctatttatttattcaattttttttttgttttagaaatgtgtctctgatgaatgttggaccaaagggagtaaacagaacccaagacatctaacaaaatgttccccagaattaagatgaacaccaaagagaatagataattttatggaaactatgttggtgggatccacttccagctgtgtggtaaatttcaaatagaaatcaatttttatttcaacataaaaatggaagtcaatattgaataataacaattacctgagtagctggggtttttgctcttttttatatttatttttattttaaaaatgaggattgttgtaaaactaacatgtatttataagaagtaatactgagagaataccctttacccaatgtgcctcaatggtaacatcctgtaaaactgtagtacagtatcgcatccaggatattagcatttaatagtcaaggtgcataacaatagagttacaagaaaatacatataaagcaagttatgcttcctttagatttattttgctctttttcttttctaggcactgtcatgagaccttatattttgaattggagacttgtgttctaatatatgcataggttttctgctctttggtgctttagcttcattcaacaaatgttaatgttttattttcatttatattcactttaatgtaatttttagaaattttatctaatattttttttctttaacccatggattatttatttctaacactgtcacagagatgaagtcagagcgtctacttatagccttgcaagggtaaaattgtaggtgccccacttgatttttttttcaaggatggaagttgggccatagatattttctgtgttgtttacctgagtaaggatgttattctctaaaagttgtctctcctgctatgctacctctttcttggcccttttgcttcaaaaaaaggaggctttcttgggggatatttctctatctgttctcattgatgtttccagattgctggtttcctcaatttcaggattttcatatatgatgaaaaaaaaaaaatccagtgggctcaccactatgtcattcctttggatccaagtctctagtgggtccaacttctctccacgtttcagagtcttaagtgacttttaaattattatttatttatatataaattaattcgtgtaattaataattataaataatgatttaaaagacatttaagaagactctgaatttatttattattgttaagttccggtgtttttagctgtacttaacagaggaagtaagaaagattacatctacttcattgtcccagaggatgaataataatgttgctcttagtattgctttaaaatttcaaagaaacaaccatctctttttgtctactttaccatacacacctattattctacttttttctcccatctttacccaaggcttagaattacattgtacttatgcttttcataattcagtgaatgtaacttgtaaatcatgcatagtcattataatgcctccttgctgttacatgttatttttcctttttccaatattgaacaatattagtgtaaattagaaattagtttatttcttccatagtgagatatttctataatttttattatcttatttttatcatttattgaaatattattcatgtctgtgtaggaaatggaaaaaaatttctcaaacttctaatgacccatactttgactacaaatattatctttaaatattgctgttaatgttttatacacacaaactacacaagaaaaatatgaaagacatttgattttggaatcactagcagggtacctggcatatggatgttacaaaatatttaaaatacatcattacataatctcaactgcagaggaaaaaaatgagaaacttctacttgcttattgagaactacttctaatgtttatacaacttcttctaaatttactacatttggtattattttgaggacccaatgtaagaaaaccatgttaacctattttaaacataaagttacaaaatatcctaatagtaagttttctgcactatacttttgaatataactcaatatactataaatataaaatattactggaaaaattatcctaagattagattgaacctcttgtgaacatatgtacatgtactaatggcaagcatagatttctgtttatttccctgtttcagtggtagatggacaaatttaagttgtaatacctgtttttatcttattatttcaagtaatttttagatgcaaaaatgtcctatttttaatacttgtggctgaaaatagtattccatcaaagacataaatcacagttctctgtgtctcaaacttaactaacgagttgttatagtaaatcaaccaaatatacttttttttctataaatatatggagtggtcctagaaataaaagcatcatggtgctggataatacagctggccaagtatatacattttaaggtgtatgtaaggtggatttctatgaaagatagatcaattgataataataagaaacagatgtaaacattcttttgaataaatttgcattaaaaattgtaaagttaattaacaattatgaaattctttttcaaaaatatgtatttaattcctgtttgtagtgaagattgtaacttcacttctagaattcccagataattgttggaaagaaccacagtaaacataagtcaaattatgataaagttatgaagcaaagatgcagacagctttgaaaatatgtacaaggggcatctgccatccctgagtagatgattaaaaagggctttcttaaggcatctagaaacagcataacataatcatttggtactctgtggttccttaccatggcagcaggctaggtttcttcatgttacggcctgcagcaagatgacctgtatttgaattctagttgtttttttttgtttgtttttgttttgttttgttttgtttttttcagtttaagaccttagggaaggtatcaaatcccttcgtgcttcaatatttataatctctgaaaatacaagcaataatacctggttattaggattgcatggtgtaatatttgtaaaacatttagaaatgtacctcacacatagaaaatgtcttttaagttctggattaaaaaataaagatgatcaatggcttaaatctaagacctgaaactataaaaattctagaaggtaacattggaaaaacccttctagacattggcttaggcacggatttcatggccaagaaccccccccccaaaaatgcaataaaaaaagataaatagctgggacttaattaaactaaagagcttctacacagcaaaaggaacagtcagcagagtaaaagacaacccacagagtgggagaaaatcttcacaatctatacatatgacaaaggactaatacccagaatctacaatgaactcaaacaaattagcaaaaaaaaaaaaagaacccaaaaattccaccaaaaagtgggctgacatgaatagacaattctcaaaagaagatgtacaaatgatcaacaaacatttgaaatattgctcagtatcgctaatgatcagagaaatgcaaaccaaaaccacaatgcaataccactttactcctgcaagaagggctataataaaaaaaaaaatcaaaaaataataatgttggcatggatgtgataaacagggaacaattttacactgctggtgggaatgtaaaccagtgcaaccactatgggaaactgtgaaattccttaaagaactaaaagtactatcatttgatccagcaatccactattgggtatctacaaagaggaaaagaaggcattatatgtaaaagatacttattcacacatgtttatagcagcacaattcacaattgcgaaaacatggaaccaactcaaatgctcatcaatcaatgagtggataaagaaactctatgtaaaaattgtaataaattgggttatttattactttctaatattattgctttttgtcttacagtcttatatttttctaaatgaataatattaagaagataaacaatatccaaatcattttcttatttgtacttcaatatgtcattataacaaatgtaataaaaacaaaatagcataagtttctgttgtagtaattttcttgctgctacaaaaaggcacatgttcccattcaaagaataaatactaataatagtattggaagacctatatttcatttctggaaaataacattaaacataggtactaaagtaccttttaaaaaggtctcattattgcaaattatattacatattttaatatattttacttctaagatctggaagatgtagaatggtaaatagtagttaactatatctatataatatatccatttttataatactttttactatgttatttacttcatcagctggcttttgctgtataatcgactacccaaaatttagtggcttaaaagaccaatcattttagatagattctgatactttgggttgactggactatggtctgtgtttactttccactgcattctttcacgtgtgtgtctgtggtcagctagcaggtcagtttgtggctgcatgatctgcataactgtcttcatatgtctttagttggtaggttgtttggtctagggacctcagctggggtgactgatttgcaatctgtggtttctaaccatgcaataagttaggcttggttgtttcacatcatggccaaagtgttccaagagcagcaagagaaggtagaatccaaagtacaagttattttcaagtctgtgcttatgtggcatgtgttactgtcccattggccaaaacaagtcatgtggcaatgcagtagagcattgtggatgaagacaatatccaacagcataaatatagggaagaagactattgcacgcactttttaaaacaataatccttatggttattaacctttgctctaaaatgtgctgcataataaaatatataatatcaatacatatctgcctgagccttatctatacctttaaattaagatcagagatgatggtgtgggaaatgtaggatgaaaaaagccacatcaggaattatatagttgatatggtctggatatttgtccccaaggatgaaggtggggtctggttggaggtggtttggtagtgagggcagacccttcacagcttgatactgaccttgtaatagtgagtgagttctcaagagatctagtcatttaaaagtttgtggcacctccccccactgtctttctcttttgctacttcttttgccacgtttagtgcttgttcttgctttgtctttctccatgattgtaagcttcccaaggcctctccagaaacctaggagatgctagcacccaccatgcttcctataaagcttgtataactgtgggccaattaaacctcttttatttatatattacccagtcccaggtagttctttatagcaatgtaagaatggactaactgaaaaaattggcacagaaggctgggactttgctataaaaatacctaaaaatatggaagcaactttggtactgggtaacaggcagaggtaggaagagtttggaaagctcagaagaagacaggaagatgaaaggaattttgaagcttgaaactagttgaatgcttgtgaccaaatgctgatagtgatatggacagtgaagtccatgctgccgaagcctcagatggaaatgaggaatttactgggagctagagcaatggttacacgtcatgccttagcaaaaagctttctgcattctgctcatgccctaaggatttgggaagtttgaacttgagaatgataatttagggtatctggctgaagatatttctttttttttttttattatgctttaagttttagggtacatgtgcacattgtgcaggttagttacatatgtataaatgtgccatgctggtgcgctgcacccactaactcgtcatctagcattaggtatatctcccaatgctatccctcccccctccccccaccccaccacagtccccagagtctgatattccccttcctgtgtccatgtgatctcattgttcagttcccacctatgagtgagaatatgtggtgtttggttttttgatcttgcgatagtttactgagaatgatgatttccaatttcatccatgtccctacaaaggacatgaactcatcattttttatggctgcatagtattccatggtgtatatgtgccacattttcttaatccagtctatcattgttggacatttgggttggttccaagtctttgctattgtgaataatgctgcaataaacatacgtgtgcatgtgtctttatagcagcatgatttatagtcatttgggtatatacccagtaatgggatggctgggtcaaatggtaattctagttctagatccctgaggaatcgccacactgacttccacaagggttgaactagtttacagtcccaccaacagtgtaaaagtgttcctatttctccacatcctctccagcacctgttgtttcctgactttttaatgattgccattctaactggtgtgagatgttatctcatagtggttttgatttgcatttctctgatggccagtgatgatgagcattttttcatgtgttttttggctgcataaatgtcttcttttgagaagtgtctgttcatgtcctttgcccactttttgatggggttgtttgttttttcttgtaaatttgtttgagttcactgtagattctggatattagccctttgtcagatgagtaggttgcaaaaattttctcccattttgtaggttgcctgttcactctgatggtagtttcttttgctgtgcagaagctctttagtttaattagatcccatttgtcaattttgtcttttgttgccattgcttttggtgttttggacatgaagtccttgcccatgcctatgtcctgaatggtaatgcctaggttttcttctagggtttttatggttttaggtctaatgtttaagtctttaatccatcttgaattgatttttgtataaggtgtaaggaagggatccagtttcagcttcctacatatggctagccagttttcccagcaccatttattaaatagggaatcctttccccattgcttgtttttctcaggtttgtcaaagatcagatagttgtaggtatgtggcattatttctgagggctctgttctgttccattgatctatatctctgttttggtaccagtaccatgctattttggttactgtagccttgtagtatagtttaaagtcaggtagtgtgattcctccagctttgttcttttggcttaggattgacttggcaatgcgggctcttttttggttccatatgaactttaaagtagttttttccaattctgtgaagaaagtcattggtagcttgatggggatggcattgaatctgtaaattaccttgggcagtatggccattttcacgatattgattcttcctacccatgagcatggaatgttcttccatttgtttgtatcctcttttatttcattgagcagtggtttgtagttctccttgaagaggtgcttcacatcccttgtaagttggattcctaggtattttattctctttgaagcaattgtgaatgggagttcactcatgatttggctctctgtttgtctgttgttggtgtataagaatgcctgtgatttttgtacattgattttgtatcctgagactttgctgaagttgcttatcagcttaaggagattttgggctgagacaatggggttttctagatatacaatcatgtcatctgcaaacagggacaatttgacttcctcttttcttaattgaataccctttatttccttctcctgcctaattgccctggccagaacttccaacattatgttgaataggagcggtgagagagggcatccctgtcttgtgccagttttcaaagggaatgcttccagtttttgcccattcagtatgatattggctgtgggtttgtcatagatagctcttatgattttgaaatatgtcccatcaatacctaatttattgagagtttttagcatgaaggttgttgaattttgtcaaaggccttttctgcatctattgagataatcatgtggtttttgtctttggctctgtttatatgctggattacatttattgatttgcatgtattgaaccagccttgcatcccagggatgaagcccacttgatcatggtggataagctttttgatgtgctgctggattcggtttgccagtattttattgaggatttttgcatcaatgttcatcaaggatattggtctaaaattctcttttttggttgtgtctctgctcagctttggtatcagaatgatgctggcctcataaaatgagttagggaggattccctctttttctattgattggaatagtttcagaaggaatggtaccagttcctccttgtacctctggtagaattcagctgtgaatccatctggtcctggactctttttggttggtaaactattgattattgccacaatttcagctcctgttattggtctattcagagattcaactgcttcctggtttagtcttgggagattgtatgtgtcgaggaatttatccatttcttctagattttctagtttatttgcgtagaggtgtttgtagtattctctgatggtagtttgtatttctgtgggatcggtggtgatatcccctttatcattttttattgcgtctatttgattcttctctctttttttctttattagtcttgctaggggtctatcaattttgttgatcctttcaaaaaaccagctcctggattcattgattttttgaagggttttctgtgtctctatttccttcagttctgctctgattttagttatttcttgccttctgctagcttttgaatgtgtttgctcttgcttttctagttcttttaattgtgatgttagggtgtcaattttggatctttcctgctttctcttgtgggcatttagtgctataaatttccctctacacactgctttgaatgcgtcccagagattctcgtatgttgtgtctttgttctcgttggtttcagagaacatctttatttctgccttcatttcgttatgtactcagtagtcattcaggaacatgttgttcagtttccatgtagttgagcggctttgagtgggattcttaatcctgagttctagttggattgcactgtggtctgagagacagtttgttataatttctgttcttttacatttgctgaggagagctttacttccaactatgtggtcaattttggaataggtgtggtgtggtgctgaaaaaaatgtatgttctgttgatttggggtggagagttctgtagatgtctattaggtccgcttggtgcagagctgagttcaattcctgggcatccttgttgactttctgtcttgttgatctgtctaatgttgacagtgggttgttaaagtctcccattattaatgtgtgggagtctaaatctctttgtaagtcactcaggacttgctttatgaatctgggtgctcccgtattgggtgcatatatatttaggatagttagctcttcttgttgaattgatccctttaccattatgtaatggccttctttgtctcttttggtctttgttggtttaaagtctgttttatcagagactaggattgcaacccctgcctttttttgttttccatttgcttggtagatcttcctccatccttttattttgagcctatgtgtgtctctgcacgtgagatgggtttcctgaatacagcacactgatggatcttgactctttatccaatttgccagtctgtgtcttttaattggagaatttagtccatttatatttaaagttaatattgttatgtgtgaatttgatcctgtcattatgatgttagctggtgattttgctcgttagttgatgcagtttcttcctagtctcgatggtctttacattttggcatgattttgcagcggctggtaccggttgttcctttccatgtttagcacttccttcaggagctcttttagggcaggcctggctgaagatatttctaagtagcaaagcattaagaggtagtctggctgcttctagcaacctaagctcacatgtgggagcaagaaaataactcaaattagaaattcatatttaacagtaaagcaaagcgtaaaaatttggaaaaatttgcagccttgcaagtggcagagaaagaaagagcttttttagcaacaggaattcaagcagggtatgaagcaaccacttgttaaagaaatttgcataactaaaagggagccaaatgctgacagccaaaacaaggaagaaaaggcctggaaggtatttgagaaaccttcacagcaacccctcccatcacattctctaaggcctaggagggaagaatagtttcctgggccagaccaagggcccctctggcctgcacaattttgggacactgcttccctcatcccagttgcttgggttcagccttgtctcaaagggccccagatgctgcttgtgctgctgctttggagagcacaaactaccttaagccctgatgacttacatttgtttttaagcctgttggtacacacagtgcaagaataaatgagaccaagcaccctctgcctaggtttcaggagatacatggaaaagccttggtgcccaggcaggaacctgcatcgggggagagccctcacagagaatcttactagggcagtgtgaagggaatttttggggttggagacaccacacagagtctccaatggaacactgtctagtggaattgtgataagggagctgatatgatttggctctgtgaccctacccaaatctcatcttgaattgtactcccataatttccacatgttgtgggagggaccccatgggagataattgaatcatgggggcagtttcctctatactgttatcatggtagtaaataagtcccatgagacctgtcggttttatcaggggttttccgcttttgtgtcgtcttcatttctctctttgcctgctgccatccatgtaagatgggacgtgctcctccctttcttccgccaaaattgtgaggcttccccagccacttgaaactgtattaaacttctgacttttgtaaattgcccactctcgggtatgtctttatcagcagtgtgaaaatggactaatacagtaaattggtaccagtagagtgtggcgctgctgggaagatacccaaaaatgtagcagcaactttggaactgggtaacaagtagaggttgaaacagtttggagggctcagaagacaggaaaatgtgggaaagtttggaactttctagagacttgttgaatggctttagccaaaatgctgatcgcaatatggataataaggtccaagctgagatggtctcagatggagatgaagaacttgttggaaactggagcaaagctgactcttgttatgttttagcaaagagactggcagcattttgcccctgccctagagatttgtgcaactttgaacttgagatagataatttaaggtatctggtagaagaaatttctaagcagcaaagcattcaagaggtgacttgagtgctattaaaagaactaagttttaaaaggaaaacagagtatagaagtttgaaaaatgtgcaacctgacaatgtgatagtaaagaaaatccaattttctgaggagaaattcaagcagactgcacaaatttgcctaagaaacaaggagccaaatgttaatccccaagacaatggggaaaatgtctccagggcatgtcagaggtcttcagctagcccctcccatcacaggctcagaggcctaggagaagaagtgattttgtgggctgtgcccagggtctctgtgctaagtgcagcctaagtaattggtgccctgcatcccagtcactccagcagaggatgaaaggggccaatgtagagcttgggccatggcttcagagggaggaagccccacgtgttggcagcttccatgtggtgttgagcctgtgagtgcacagaagtaaaggattgaggtttgggaacctcaatctagatttcagaagatgtatggaaacacctggatgtccagacagaagtttgctgcagggttggagctttcatgaagaatctctgctcaggcagtatggaagggaaatgtggggttgaagcccctacacggagtccctactgggatgctacctagtggagctgtgagaagagggtcctccagacccgagaatggtagatccaccaacagcttgcgctttgcacctggaaaagccgcagacactcaacaccagcccatgaaagcggccaggagggaggctgtaccttgcaaaaccacagggacagagcttcccaagaccatgggaacccaccacttgtatcagcgtgacccgaatgtgagacatggagccaaaggagatcattttggagttttaagatgtgacatccttgctggatttccgacttgcatgggccccgtagcccctttgtttcggccagtttctcccatttgaaacattgtatttaaccaatgtctgtacttccattttaactaggagataactaccttgcttttgattgtacagcctcataggagaaaaagacttgccttatctcagatgagactttggactgtggacttttgagttgattctgaaatgagttaagagtttggggtactgttgggaaggcatgattggttttgaaatgtaaggacatgaaatttggcaggggccaggggtggaatgatatgatttggctctgtgtccccagccatatctcatattgaattgtactcccacaatccctcatgttgtgggagggacctggtgggagaaaattgaatcatgggggcagtttcctccatattgttcttatggtagtaaataagtctcatgaaatctgatggttttatcagggatttctgcttttgtgtcttcctcatttctctctttgcctgctgtcatccatgtaagacaggacatgcttctccttgcctcctgccatgattgtgaggcttcacttgccatgtggaactgtaagtccaattaaacctctttcttttttttttttttttttttgtaaattgcccagtgtccagtatgtctttatcagcgataacagactaatacagggacccccataattcagactctagaataggagatccaccagctgcctgcactctgcacctggaaaagccacaggcattcaactccaacacacgagagcaggcctggggttaaaccctgcaaagccacaggggtggagctgtttaaggccttgggggcccaccccttgaccagtgtgcctgggatgtgggacatggagtcaaaggataaagttgccattgcaaaattgtaactgagacagtaaaagagatctgacttatccaactccatcttgtttctaacctccaagcattcctcattcattcctgggcataggctgaactaactttggaggaacttagtttatagtttaaagcaaagataacaactctttcccaaaacaaacctctttcttgcctggggactaaactacctttgtaaaactaacaaattagccacaagattagaaattatagtataggagttattcagctggaggtgacaagattctgacagtccctaaactgctcccaagatcattgcttgagatattttgcagaccctgtacctgatggatcaacttgcaccacctagattactaactggctcagctaatcctgtggcccccaacgcaggaacggattcagcacaagcgcacaactttcatttcctatgatttcatctctgacccaaccaatcagcactcccaactcactggccttcctccagccaccaaattgttgttaaaaactctgaacgatgaatgctctggaagactgatttgagtaataacaaagctcttgtctcctgcacagctggctctgtgtgaattactctttctctattgcaattcctctgtcttgataaatcagctctgtctaggcagagggcaaggtgaacccactgggcagttacaaggagattattttgaggctttaagatttaatggcttccctgttgagctttgaacttgtatgcagcttatagccccatactttgaccaatttctcccttttggaaagggaatgtttatttaatgcctatacgcctgttgtatcttggaagtaggtaaattgttttttactttacagagtgataagtataagggacttgttttgtctcagataaatctttggactgtggaattttgagttaatgctgaaatgagtaaagactttggggacggttgggaaggcatgactgtattttgcaatgtgagaaagacatcagatttgggagggtccaggggtggaattatgtagttcagatattgatgaccatccaacgctcatgttgaattgtaatctgctatgctggtggtggggcctgatgggagatgtttgggttatggaggctgtattattctgttctcacattgatataaagaaataacggagactgggtaatttataaagagaagagatttaattgactcatggttctgaatgctgtacagaaagcatagtgacttccgctgttggggaggcctggggaagcttctgatcatggcagaaggcaagggggagcaaggcatctttcatgtcaggaagaagaacaagaaagagagagagagggaagaggtgctacacacttttaaacaaccagatgtcatgagaactcactcattcattatcacaagaacagcaccaagggaatggtgtcaaaccattcatgagaaatatgcccccataatccaatcgcttcccaccaggccacacctccaaaatcggggattacaattcgacataagatttgggtgggaacacaaatcatatcagggttggatccctcagggcttggtgctgacttcaaagacagtaaatgacaaaggataaatgcttgatggaatggataccccattttccatgatgtgcttatttcacattgcatgcttgtctcaaaacattacatgtattccataaatatatacagctactatgtactcacaaaaattaaaaatcagaaaaagaagaaaagaagaaaaaaagatagtgatttctcacaagatctggccttttaacagtgtgtggctcctcctcccccacaactttctctctctttctcctgcttcttcaatgtgacgtgcctgctcttgcttcaccttccaccatgactgtaaccttcctggggcctcccaagaagctgagaaaatgccagtatcattctttctgcaaagcctaccaaactgtgagccaattaaatcttttttctttataaattaaccagtatcaggtatttatgcaatgcaagaatagcctaatacaataattattttacaaaagcttgtttgttgtaggatctatcaaataggctaataaatcctgtaggtacttctggcctggttgtcataaacgttagcaatgtcattatcggtatattctttgttatcgaatcaacagatatatctcagaagatattagaataaaggtaataaacagaaataggctgaagtgttcctcccaggagaatattacaatgtgtcaaaataaacataatgatattctgaaataggggtcccattctagcttcagctacagatgctaacctttctagggacatgttctaaacattcctactccaaacaaagcagagagatgggaagagaatttttttttagatagaaaagatgtagtatcatgtagccatttgtgctcaccagctccaaattagacctctctgacattggtaatgagggctcacataaagagatagatatgaagaactgagtgattcatgctacactactgacggtagtaaaccttctggcaaagaagcagtatccagaatttggggaatataaaatttggaaaaatagaatccatcagttcatcctttcaagccacactgaattcttctgtttctgagtaactgccctactaaagaagatttcagaattaaatataacactgctgacatcctaattctatttattttattttattttattttttgagatggagtcttggtctgttgcccaggctggagtacagtggcgtggtctcagctcactgcaacctccacctcccaagttcaagcgattttcctgcctcagcctcctgagtatctgggattacaggcgcctgccaccacccccggttaattttttatatttttagtagagacaggatttcaccatgttggccaggctggtctcgaaatcctgaccttgtaatccattcgcctcagcctcccaaagtgctgggattacaggcgtgaaccaccgagcccggccaacatcccaattttattctgcctcaacacaaagtaatttgctctcatgtgttcttttctgtactgttattctcttgccaatgtgtagattttcaccactgaagtcacctttctactcttctactcttccctccaactaaaaaactcctcaattagctcaggctcatctcctaaaatttcttctcctgtcttaatttaaatttgataataatctagtaataaagtgtttcctgttatatttttgctaaagactgcttttcattttattttataaggaattcaatattgaaggcattttggggttttctttgctttaaaatgtccccatttcttcaataattaaaataacactatacacaaacagtatatcctttgagattcttgtgtccagcttcatcttaatttgccctcacctcactttacctatctgctcaccaaagtgtctcaattatttattattttgcctcttaacttatacactctgatgttactcttgccattgttatagatacattcaccattcaacagagtcactgtattagttttctcgctgttgacaaagacatacccaagactaggcgatttacaaaagaaagaggtttaaccagacttacagttccgcgtagctgggaaagcctcacatagcagaaggcaaggaggaacaagtcacatcttaacatggatggcagcaggcaaagagagagcttgcgtaggggaattcctctttttaacaccatcagatctcaggagacttactatcatgagaacagcatgggaaagattttgccctcatgatttagttacctctgactgggtccctcccacaacacatgagaattcaagatgaaatttgggtgggccttcaaagactatttcctccatagcttctccttaataaataaaatcttatatttttaaaataccagactaaaaactttgaagtcgtcttagattctgctgttactttcatactacacaggcagttccacagcaaatgatgctggttttgctttcaataatgtatctacaatacagccagtacttatcttgtatatactagttgaaatcaccatgatcttatgcttagattattgcattagggcccttactggttttattttacttccaccctacagtttagtgtatctcaaaagaggtatccaaatactttctttaaaataaatattgcattatgtcacttctctgatcaagacctaccaaggacttcctattcattgaaaggaaaatctaaattttgtaaaatacctactagcttttacataatttatataaatacatacacactttatgatctggcctcaaggctgtcaggtgcagaacataaattgtgtagtacacaatataaaatgaaccagcagaccgaatctttataaccatacacggcaatcttatatcttgttatgtccttttccctatttgtttttaaagttcagcaatgcatgccctcttgattttcctcaaaatcattggaacctcctcctcaagtgatttacattttgttccttctgctaaaaaatgaatgctcttacttaagttaactatatgatttgcccctttggtttcttcatatctttgctcaaatgctaccttattacacaagcctttcttgaccactatgaataaaatgacaacactgcctggctcactcgaccccctgaatcaattctggaattgtttgcattgacattctcttttgttctgtagtttatgtctagaaagctgatccctgcaggctctgttttccagattcctgggctagctgggttcagttgggtttgtttcatgacagggaccaacaggatttttggagaccagaaaaataagagaggccaagttaatctttttctctctttatcatagtgagtctttctagcagacattgacttcattgacttctctgtgtggctgtcttagtccaccttgtgctgcttttaagaaatacctgattgcagagagccgagatggccccactgcactccagcctgggtgaaagagcgagacttcatctccaaaaaaaaaaaaaggacctgaggtggcataatttatagagaaaagaggtttatttggctcgtggttcagtatgctctacaggagacgtgacactagcttctgcttctggggaggcccacggaagctttcactcatggcagaaagcaaaggggaagaggaatcacacggtgagaggaaggaagcaaagatgggggtaagaggtgccaggctgtttttagctgtctctaacaatcagttcttgtgggaactaatagagcaagaactcactcattatcaggcacaaagccattcataagggattcacctctacaacccaaacaccattcactaagctccacctccaacattaggaatcaaatttcaacataagattcggaagaaacaaatattcaaatgatgttagtggtttttagccagacccaacgatggatttatctttcactgggtataaagtcttaataatgaccttaaataataacctggagcccatgaatgttagcttttaaagcaaaagggactctgcatgtatgatcaagttaagaatcttgagtggcagagagcttgggtgacttttgccctagttatgtggaaaacagaacttgtaagcaataaacttgtatatttagtttagacgatttataagtaaaatgttgaagttgcagccttgcttctttttgctgcttatagtaaaatgttaaaggaaaaagataaattgaagaaagaacagttaaacaaaaataaaccagaacttgatgacctgagaaattcttttatttatttctttactttttgaaacagagtctcactccattgcccaggctggagttcagtagtgctatctcagctcactgcaaacctccacctccttcctgcctcagcctcctgaatagctgggattagaggaacatgccaccacgtctagctgatttttctgtgtttttagtagagacaggatttcaccatgttggccaggctggtttcaaagtcttaacctcaggctacctgccatcttgacctcctaaagtgttgggattacaggcgtaagccaccatgcttggccaagaaattcgaatactatccaactttcaaaagacgctaaaattaggagattcaatatccaaaaagcatgcttgaaaggaaaattcaaggatgtcaccaaacaacttttgaatagtgcttcacagtattaaaagatcataatctacattcacacagagggctctttaaagacattaagaatatgattcatgagttctttcaactatcctaggagaaaccagaaataaagatggtattatccaggaaacatcttgggaggacactcctgtttaatggaataaatccccatgacttacacaggagatccacgatgtacttgagatgttatgttggcagaaacactgccagttagccctgaaaaaaataaagaaaggaaacaaaataaagaaagacaggctgtcagactcccaaatttccataagcaggaaagagggataaaacgtctcagcagtaaacatgtgcacctttcaagggaaaaggaggataattcatgagcagagcctcaagatcagagggtagatcctggaaccagagaatgcaggtgtgggtctagagaatggagccaaaatccacagaggtttgctaccaggtcttgaaacctaatggactctactaaacagtaggatttcaaaattacttaggactggagtctcctttcttcttttagttttctgtcatttataatgggaatgtctataattattatctgatgcctgtttctccattgtattttagggatacattatttgccttctcatttcccaagtccacaaatggaaaaaggattttgctctaggatggatgatttagataatgagagttaggactgttgagctaataacatttacgtaagattttggacttgaatgataatgtaataggttaagatatttggtgatattgggatggggtgattgcattttgaatgtgaaataaacattagtctttggacactagagggaagactatggtagaatgaaaaatggctactcaaaataactcgggtcttaattcctggaacctgtaaatgtcagcaatatggcaggactttgcacatgaaactaaggtgataatcttgagacagagagatcattttcaattatttggatgggccctaaatcacaagtgtccttgtaggagagaggctgaatggatatttttctacagaagagggaggcgatatgataactgaaacaagatgctagttgaggttttgaagatggagaaagggattgccagtcaaagaatgtagctctagaaactggaagaggcaagaatatgaatattctcttagaacccctggaaggattatggcactgccataaccttgatttagatctaatgaaactgatttgagacttcttactccagaattgtaaaataatgaatgtttgttgtattaagccaataagttttccataatttgttacagccaaacatgggaacaagtacattgggtaaacttggctgttcagctgtggtaattccccttgctccttttgtccctatggccttgctgctataaaaactcttggtggcatcacagtgttctatttaggctcccatcccttccaccagttgtgttatcaattcgctacattaaattccctcttttaaaaaaaattagacttttttcttctagtttacatcctgcataatatacttattcccttaccttattattttctatagcagttatttatttgatatgtcaccaggttgaatgggctacctaaatgaatattgaaatgacttggaatgatcattggagtaagagtaagtcagaagattctaaactggttacatcatttgagaccaccaacaagggtccagtatcagatgtaagtagaaaggaaatagattgtctgagagcatgcatcatttgtgagataatttaaatacaggtggtaaaagaataaggtcttgatatgatagtggagaaaaggagagtacctaacctcagtcgatgactccttctccctagtacaaacgaatagtttaatgggcacctagaaaatggtggaggggaaccaggataaaaatagcatagtcaaaataagtagacttcatttaaggctgttatttgaagttctctgaaatagttgtgagtgttggcttgcaatacaaagggagcttagcaagcactgtggatagcacttgtaaataggaaaacaatgaaaacctgagtatgaaaaagttttaggatgtttttaaaaatatcttttttaaaaacataaattctgtgaatgttgaaagttagaagctaatatctaaggagtatttattttattccaagctaaattattgtttcatttatatcatctcaattacttcattatgctttaagaagtaaatagtgctgttactcccatactgcagtgtgaaaattgaggtaagagagtgagttaacttgtccagaatgacagattgtaagtggagtggacttatcagtggagtcgacttatcagtggagtcagatattttacattttctttttttccttagagacaacctagacaaccacactgatgtattgtcccctcacttatcccttctatctatatccatataagagttaataacatctggaggacctttgtaggaatttaataaatgtttgttatttatgagtgttttagttcctttgatgaagagaccacatacatacatgaaagttattaacagcaaaatattgatgtaagcattatcataccatcagagccactcacaaggaacataattaagagaattatctgatattcatccagaggtctagtgattccttatgcttatttattatgtttattttgccatgatgtgatttaaaatgcaaccatagtgctgctgtaatgtctctgttcagccatgcttctagaaactctccttacacttctcatctattttatttgccaagcagtaagcagtttatgtaatgcatggaggcacctgacctgcaaaacgattaacatttactctctggatgaccaattcaggtacagtaattagaaaagtaacaaggtcaaaaggaaatccatttattgtttccgcatttgaactttgtaaaatgcttcaaatgatatatattatttgaaacatatacataaactaaatcacactaaagtgtatttttataagcaatatctgcacatgagcatgtattaaataaaatattgagtgttcttaattctgcaaaatgagaggccatagttagtgaataactttttattacccaatatcttcccagtcaagtagctcaattttaaacaaaaacttccataattttagatgccttcagaaaacgattgtattttatgtcacagaacatacatagagactagttagaatacatgtgtagagtaagtatttatgaaacaactaatctctttcaatactttttataaaacttaagcttctcatgaatccattttgtatcccaaataactgaatagggctagcaagaatcctgaaataaagagtgttacagcaaacagctattgggaccattaacagcaacaaagttaatgacataatgcactaaagttcttaggcttaatttagtttaaatttctaatacattaatctaaatatataagatgcttcttgacttacggtggaattacatttggattaatttattatgagttgaaaatgttgtaagttgaaaatgcacttaatgtgcctaacccactgaacaccaaagtgtagcctagcctatcataaatgtactcagaatgcttacattagcctacagctggcaaaatcacctggtaacacagtacactgtagaatattattgtgaggctgactagagctttggctcactaccaccgctcagcattactagaatatcagatcactttatgctgaaggcttatcacttttacaaccattaggaagttgaaaaattttgagtcaaaccattgtaagttgaggacaaagtataggtgacaaaatatgatattttaaacaacttcaatgttagaaacaataacgataatatcctatatagcttcaatgttagaagatttttttttgcctcaatataggtgtcatgtgaagatgtgtttggctaaaacaacttattcaaatatggaatacttttacaataaactttaatacgtacattaaaaagagtaaaagttaaatatgatgtgtaatagttaattttatatcaatttgctggattattttacccagttatttaatcaaacaataatttgtgaaagtattttatagatgtgattaacgtatacaatctgttgactttaagtaaatgagattactcttgataatatgagtaggactcattcaattatttgaggatcctacaagcaaaaattgagctttccctgagaagaaaaaatatactgctttaagaccgtatcatcaactcctgcctgagttgacgagctgctggcttgccctacagatttccgacttgtcagccccaacgattgtgtgagccaatttcttaaaataaatttctttatgttgatctatatctatattcaaatctaaatctgtacatctatttcttgttgtttctgtggagccccgtaactgatattgattttggtaccaggaagtgagatgctgctaaaacaaatacctaatactatgcaaatggtcttggaattcactaacgggtaaaggctggaggagtttttagatgtgtgatgtaaaaacctgggttgcctcaatgaggctgttagaaattcgaataaggagatcctggtaaggacttaaaaaaagaagtgaataaagttgtagagaaagcttctatcatcttcaagaatatatatatcatcacggacagaatattggtagaaaaataaatgttaaaggcgtttctggtgaagtctcacatagaaatgaagataatattaataaacacttgaggaaagtgacccttgttaatgagtagtggaaaaattgactagatcgtgttctaatattggatgtaagaaatgagtttttatgtttggcggaggtgatttccatgcaaattatagaaggtgtgtcttagtttctccttgcttcttatattaaaatgcaaggtgaaagaaatacactaagaagaaaatgctaagcaaaaagtaaccagaacatgatcatttgaaaaattctcagcctatattgcaaatggcgttacagtgtgctcttgaggaaacacctatggatggctagacaaacttttactggagagattaggtgtgtgacttacgtgcaatggtttagatatggtatgtttgccctcagcagaactcatgttgaaatttgatttttaatatggtggtgttgagaggtgaagcctattgggaggcgtttcggttattggggcagattcctaatgaataccttgcttctgtttttgcagtaattagttctcactctcatgagactagatttattctcacaggcatggatttgttcccacaagagtacattatcataaagccagggcgtcctttaggctttccttttttaagtgttcacttcccctttgatctttgtcatgtggtgacacagtacagaaacccttggcagaagccaggtacatgcccttgaatagctcagcctgaagaactgtgagctaaataaacctcttttctttataaattacccagtgccaggtattcttttatagcaacgcaacataaactgggacacacatgtattcaataaacaatctcatcagaagctaggagtatagctgaggtcatccaggaaggatctatggagaatctttgtatctaacaacatggatccccttgacatatagagataacccacagggttttaagaatgttataccaattaaaaaactgccaaattggactaaagaagacagatatgggataaaatgaaagaaagactctgagactctgagggttctactggtagaaaatggactgagagggctacttggttttgaacatatgttcccattttaggggatgttgggatggggtgaaggtattttgcacatgggacagagatgaattttggaaaaagcatagtgtactggaatgcatagtgtcccccaaacttaatatggccctccaaagtttatgtctacccaaagcctcagaatgtgaccttgtttaaaaatcaggtcgctatggatataattggttaagatgaggctatactggattagagcaggccctgaatctactcaggcaatcttataaggagggggagcttaggaaaccatgtgaatgtggagtcagagactggactgatctataagccaaggaattccaaagattgctgaaaatcactagaaattagaagagaggcatggaacagattctccctcagagtctccagatgaaactgccactactgacaccttgatttcatagttttgacttcctgagtgagagagaaaaatgtgtgttgttttaagtcacccagttggtgatattttattatagcagccttaagaaactaatagatcacgataaaaattatttgaaattagagtccataatcaatacattcatcatcagatgctttcttaggtaaaagaaaaatgaaaatacatttcttgtattttctaaatcttgtgcctgagaaagatcaaaaagcatgaataacaaaaattaagattgttagtattttcacgttcaatgaaaacaaatatattaaaataataaaacagtggtaaatgatcatgtcaatttattacattttgataaaaacacctgtttactttgagtagaagtaagtcaacatgatgtctttaaacatttccacctaaactgctttttacctataatcaatcttttaaaatgtaaatatgttttgattttagatcttatcagtttgcttgaggcacagatgtcaaaatgagatattttttaaatgaatgatcatgaggaattttagctgtatttttcaaaaagcataatttgagtctggcaataaacttaaccttaattagaatagctattacactagtgatagaaataattactgatatcagaatgtaatatattcagtaggatgtaaggtccccttagtattttgatagctaaagaagcattgaggccatattttctattaaaataaatgcaacttattaaatatatgattcaaaacattttgcatttgtctctcggtatgaaaaagaggcacatttcattatcaaatgttctttttatcttttccaattaccctgcagcattaagaaaacacattttcccacatttaattaaagttacgcatgatcagctttaactggtaagcacaaataaacctttgtaacttctatgctattcagttcatctacaaatatccagtctctaaagtatcttgttgctgataataggctgttaaaatcaattactacaatctatgaggtgatctagactaattttttcttatatatatgtactaaattcaacttgcaataattccacccaacgtaacaatattttacattttttatgcatcactttctaaaacagaagaggcatactttgaccttaaaatttaattctatgttgtggaatttttaaaatataaatttcagagtttactctcatattcactgttaagaaaatactaacttattaaccatttactataccccacactctgttttgtgcagataacttaagtaatgtaaatccacagtcaaaaaaatcaatataaaagatagtcatgcctgttacgttacaaatgagataaatatatgtatgacataatgttttgagagctgataagagttagaaatgtatcaggtgagttagaaatgattacataaaagagagattgaattaaaatatttgaagtcaaaaaggattccagacaatgactaccaccttaacataaacaacagatgaggatagcttggaccagtgtaggtgatgaaaacaggtttgattctggatatattctgaagtttgaagtaacaggaaatgctggtagaacacacgtggatttctgtgagaatgttttttatttttttgctttaaaatattttgacttctactgaaagtggaaatgctttggaagagatgggaatggggaaatctttgtgtacatattaaattttgaatacttattagtcatccaagttgagacaaagaatagacagtacatttatgagtctgaattcaagaaagacttaaatatagaaatcatcagctttttttttttttttttgagagagagtctccctctgttgcccaggctggagtgcagtggcacgatctcggctcactgcaacctctgcctcgcaggttcaagctattctcctgcctcagccttctgagtagctgggattacaggcatacacctccaagcctggctaattttcatatttttactaaagattgggttttgccatgttggccaggctggtctcgaactcctgacctcaggtgatctgcctgcctcggcatcccaaaatactaggattacaggtgtgagtcactgtgcccaggccatcagcttttaagcaatatttaaagccatggaaataaaggagatcaccaaaaaatgattctaaatcatgatttctcaatgttggcaatattgctatggaagggtggataactctttgttttagaaggctgtcttatgcagcattccaggcctctacccacgatatgccagcagtggtaacccaaaatgtcaccagacattgccaaatgtcccatgggagaacagtcatctccagttgagaccactgactgctctagaatagaaaaaaagaagctccaggactaacttttaggattctccaatgtttagaagttaaggagaacagccgggcttggtgtctcatgcctgtaatcccagcagtttgggaggctgaggcaggtggtcaccttaggtcaggagttcgagaccagcctgtccaaaatggcaaaaccccatctctaccaaaatacaaaaaattagccaggtatgctagcaggtgcctgtagccccagctacttgggaggctgaggcaggagaatcacttgaacccaggaggtggaggttgcagtgagctgagagattgcgccattacactccagcctgggtgacacagtgagactctgtctaaaaaaaaaaaaaaaaaaagaaagaaaaagaaagaaagaaagaaaaaagtagttaaggagaactgaagaaaccagcactacctctgcagggaggtcagagagggaaacaaagaatcaaacaagaatagggctctgaaagcaaaaagaagaatttgttacaagaaaaaaggagaaataatccatggcaaaagccatggtttggttaaataatagctgagataggacttgaccattgttttactaacatcaagatggcaggaaaccttatcaagaaacacttttgctggagtagtgtggggacctggatatttacactatactaaattataccccacagattacatggagattgtagaataaacagttcaaattgcaatgtggatatctgaccgtccctcttgaaccagcagtcagtcttagaatcttttaatgtggaacaagcagatagcatattcctcatgatttgatgaaatgtaaagtcacagtgtcaggtataaagtattatgtaatattctatctataatgttgaactcaaatatgatcacgcctctacatgtaacctacagtttacatataatggaattaaagggataagccaaatgacactataaccaatgagaaaaatttataaaatgtgacattctacaacatctgacatcagcaataatttcatgacataagtataaaagatagaagaagatgcaagaataaaacaggcttacaaaacattaaaatgcaatttgtagaccttgagaaactctgacttcttaacaaatcaaatgtaatgaagaataggataactggacagatttgagtatagactgactattagatgacataaagagttaatgctatttttgttgttatgtctgacaaaagagtgtgattgtattatggaatgaagtatttagaatatagaactgcctgactctactttttcatgtttgattgctcacatcttacaaacctcactgctcccttctcttcttaggcctcgctattaagcaggttgacaatattcctctttcggctggtagaagattcgaaacactcaagcctcttgaatattcctgggaaccctcacctcacccccaattcttaaacacaatgacatctccaaactagtctcttttccttactctctcaagccatttttcagaccagcttggaaagggtgtcttgtcctcaaaatgctttattctgttagtaataaatattttcataccgtcgtggggtgtttgggggtgtgtgtgtgtgtggatgtgtctgtaccattatcattattgacatctggatcaaattttgggtggaagtctgtccttcttctcagagtgtccaaaacaagatgtaatgctataatgtttgaaatttattgtagtatattttaaaagaataaaagaagagaaagagaagaataaaggaaggaaggaagaaaagaaggaaggaaggaaaagagggagggagggaggagatgaaacaaaataaaaggtaataaaaataaaggaataaattttaagtgaggcaactactgtgctcaaatttcttaattctcttctttctgacttttaccccgaggctgcagaggaagtttgagtattattaaaatgctggtggagaggagtatcaactgctcttcttcagtttcttgacagactttttactgttacggcatttcccacttttccatttctgttctcactacacgtactgagcaagctcaagcatatactgccctgtccttgttacctttgcgtgttgaacttagaacactatatgttctaaaaaaatcacagatgtattccaatgcctaggtcctataagtatacccctaggctaactactttcctgagtcatgaccattcctgcagggtataatcaagttctaccctctaactttaaatccacatactctttttgtctctaactctggttcttcaggtggctgtgaagcactctgaaagactttcttttcccggatttccaatcaagggggtagatttatcctcctttacactagaatgttcatgtttgcccaggggtctgtgtgtcactgccacagtaacagaagattaagagtcattcatccctttctcagttctttcccctcttactgggcttttccgccggcccgaaaatatttgtaagtgctttcccagccttttagaatgctgagtcttgttttgtgctttatggtaccactttgcaatttgagtttgccaggtgttggttattgcctttcccaattctcgagccattataaaaatgtctttccatttggtcctaggttgcaatacaataagaattaccactgttatggtttggctgtgtccccacccaaatctcaccttgaattgtaataatccccatgtgtcaagggtggggccaggtggagataattgaatcatgggggtggtttcccccatactgttctagtggtagtgaatacatctcatgagatctgatggtcttgcctaccaccaagtaagacatgactgtgcttctcctttgccttccaccataattgcgaggcctccccagccatgcaaaactctgagtccactgaatctctttcctttataaattacccagcctcaggtatgtgtttattagcagcatgagaacagactaatacaaccacaaattaaaaatacatctgaaggctggctgcatggctcacccatgtaatcccaacactttgggaggccaaaacaggtggatcacatgaggtcaggagtttgacaccagcctggccaacatggtgaaacccgatctctactgaagatattaaaattagccaggcctggtggcacatgcctgtaatcccagctacttgggaggctgaggcatgagaatcgcttgaactggggagacggaggctgcagtgagctgagattgtgccactgcactccagcctgggtgacagagggaggctctgtctcaaaaagaaaaaggaaacagcatacatctgatcttatttcaaacctattctatcacatatacttctaggcaatcacattctacaactacagtaaaatcctagatgttcaccaaacttgacgttgttcatgtaaattaaccagtaaataaatgtaactgtatgtctaataagataatattttatttttttactcatacatctgttaattcattgatattatgtaagaaaataattatatatcattcactatttaggtattattgaaaagttttgaagctataaagtaaaatacaacacatctttcttccttcaaagaaatcacaattgacagtgacaatagtttaatacatatataattttgaataactatgaaaatagatatatccatatggctttgtgggaatgctgaatatttgtaactaacccagctgagaggagttaaatggatcttgaccttgccttgaaaggactttggccagttcgtctaaatctgctcctggctctctggatcgtgtatgataggaaaaattccacaggagaggaccacaagggaatgtgttctcagttgaggaccaagtgctagtcaaaggaagcaggtaacagaaaattgtggtaaaaatgagaaagtggttaagtttatttccagtggtacaagggttccataaagcagaggaaaggactgaaggggaatccattttaggagcttccaggaaatggaagtttttgtgctctaaaaagataagaaaataagagggcataaaatttagaccagattgggaagaatggcttccaaaggaaggaaaagatgagggtaatgtttagaaatgactggattcaaatattttgtttctggcagatgttattttggggacagaatgactaagggttgatctcaaataatacttggtctatgaaactggtataatggatgacagtagccatgtccttaaatagagatgccctattctcatgaaagaaactgaggaacaaattagacagaactctttctgtgcaaagaatgtttcatggtgttcagaagaatagagagagtgtgtcttcaagtggcagaccctgttaaaacctgggagaacaggtaaaatcctgtcctagggtatgggttaatgacttgttttgattaagaaccatattctgagaattctacttatttgagaaggtaaatatcatctaccatagattataattttaaaaatgaatactaaggcaatttaaaacataagtatcttacaaaaggtaacagtgttcataaatataaaatttcaatattatataaattcaatttctatcagttttaatatgattttttttactatatattcatcagagttctctggagaacaggacaaatggaattttttttatttacttatttactttaaggaattagctcacatgattatggaagtttgcaagtctaaaattctcaggatgggctggcaggctggaaaccaggaagaagctgatactgaagttcaggtccaaatgcatctgctgaagaattcccttttgctggcaagaggtcattcttctgttctattcaagtcttcaactgactggaggaggcccattcacattatggagggccatctgctttacttaaaatccatcaatttaaatgttaatctcatcaaaaaatatcctcatagaaacatccagagtaatgtttgaacatatatctaggcaccagccaagtggatacataaatttaaccaggctacagtggaattagcctacaatcattgatcattctttaatgttatagtttacgtatataagatctgaaaaatgccatttttaaacatttgtatagcaatgtataagttatcaattgctgtgacatagataattccagtttatcctcaatactacggtctgaagggaaagataactaaaaatttatagggtccattagaagaattgccagtagaaatattacttttacaggtttggggataatgagccccacatggtttaaacaaatatgcaagataaaacagccagtaaattagtgcaaataagacttgaatgtcagccttctgactacaagcctaaaacttttaccaccatagctgtgctttagagagaaatgtgtctatagttggaatcaatttgtaggatcagagcactgagtccctttaaatttaggcagagcatcattcttcattagagagccagcatgtggtaggaaactgattaacttatagctcttttaaaggcacccacaggtattcatgtcagcaatgtactatttaccagtcacaaatctagaggtgatcttaatatggaaatccttaatttgaaaataaggacgatttcatattacattccaaagaccgtaattgtctttaaattgcccttttttactctgaagatttgatctctgaggcctgaaatgaaactttaacattttcaattaaattcaagccttcaaggtttggttgaaactaagaaaatgatttgtgaacctccttttaaactccctctgaaatcagcttcaagctagtaaagttctaattcttcacatttagtcgagttataaaagagaagttcctcaatgctaaactttagtcataaagtgcaagctatgccaaaaaaaaataaaaaaattttttccaattagtcattaggcttttatttcaatatctaaaacttttttaaaaaaaaaacagaacacagcttattgtttgcatgcattgtttaggaggtgaaggcagtaaaacaaagcaaaattaaataaacaaaattatcttgccttctattacttggcatctgagagttacatatccggcaattataatgcgcactatatatttttaaggttctctcaaattctgcgaaatattttgggatgtttcatttcaaacatctcggaaagcttcactccctaacatcttcaatttactctttctaaagtgataacatgcttttgctcctttgaggaataaactgttattgtgatgtattttttcaagatgttcagaatgtgagaatatcgtgtaatgacgttcataacttctgttatctgccctattggtaataggaaatcggccacgaaaagtgatcatggaatcccccattatgttgccttcagtcttcatgctacaatatattaatatcttcctctcttagttcctccctctttgactttatcattcattagaaatcctactctcttatttttataagacttttagagaactgaagaatacttctgaaagtgtgatacaattttgaagttcatcaattaatttttttcatttctcatctattagcttatttgtttttttgtttgttggttggttttgagacagagtctctcactctgtcgtccaggctggtgtgcagtggcgtgatctcggctcactgcaagctccgcctcctgggtttaagcgattctcctgcttcagcctcctgagtagctgggactacaagcgtgcaccaccacacccagctaatctttgtatttttagtagagacggggtttcatcttgttggtcaggctggtctcaaactcctgacctcgtgatctgcctgcctcggcctcccaaagtattggcttatttaatatctctacaatgatagatttttgatcattctataagattaaagattgttgtgttatagcattggtagaaatttgtgaattaaatgtaacagacattaaaggagaattcaaagaagtttattttatcactatatccaaatatactgctaggatttacacctggccttccttgtcaagtgttggactttttataggctgtcttgcatcttgaatctatggattccggaataaggatgaatatgaaaatattatagaacccagtgggttcatgtttcaatgaagctggacatgatttatcctcttaaataccttcataaaaccaaaagtgagttagtaaaaatttaagtaaagataaagtgccatttgttttctggtgtgagatattaatagaaaataaggcacaaaaattggtcctaaatagaaatagccaataatttttatgtaaactgaacagctgtgaaaacaccaaatataaatttccaagttcatcttaacatatagactggagtattatgtattaggtatagttgctattttgacacattttcttctataattctagaaatttcttatatttacctgcaataaaaatttcacaaatacctagatttaattttgaagaaataaataaatgaatgtgattacaagtctttaaactccagtggtaatttgggtatcaaaattaaagcctttatattcatttattataaaatttaaagaatagtcatgtataaaagtgttcaaaatattctaaaataacaggtaccactaattattcttttctattttagctattatcaccctataccagtttgtaacatactagcagaattcaccttagaaagtcaaatcatgaatattgctggttttatgtaaaatatcaaggagagatgaccttgtacttcttcttactggcttatacaaaatcaacttgataatggatgtatgctgtttctaaataaggcgtttaatattcaaatattttcagtgactgggataaatcacccatttcatatcttaccctagtaccaaatgcatggccattcattccgtgttaaatatagatctactagaggacccataatttagcattttagttaaatagtctggtcatgttagtatttatttaaagaaaaattctatcccatattctctctcattctgtatatcatgactttgaattggtgagggcttttgtgtacttggagtttaggtcaaagtaataaatggtaagattcaaagttgtggaaactccataatattttcaaagtaagaaaaacctagccgtgtgaccttctaaactttaatatttatactgtctcaaataattaagttgtgtataaattagcatatataaaaatgtccttatttgtgctaatttatgggctcttcaaaaataacacaaactcaccacaagtcacacataagctattatagcactgtgaagaataaagaaggtcatcagaatttgtttctcaatagaagagttgattgtagtaagactttgaaatgaaaataggcacttaaaaatggggcatttatataaaatataaagactttgacaaatcagaaaagctgaaaaataagaaggaaggagtaaaaaaggaagacaattagaaaataagtattaaaaaagaaaaatgacaatggattattatacttgttttggtttaaaaattcataaaatttcagaggagaaattatttggtactagaattctagcagtcactgacccatgcattcttacatgtgtcctgttttcttagttttacttattcttgtaggtatcctattttcacgggaacatttttgtttatctctattatctcagtttaattgtgtcgctctcccaatatttctcaaaataacaaaaaacacaacaaattataaattacattcccaaaacatgtgttacttaatagccaggaacagtgcttccaaggtgtttcttcaataaatacaaaaacatattctttaaatgacttctgttaaaaaaaaaaaacaagaaaaatgatcatgtgatgtgaaggcatttgatatagcttggatgagtgtccctgcccaaatctcatattgaaatgtaatccccagtgttggaggtggggcctggtgggaaagttatggcacctacccagtgctctcctggtcctgctttcattatgtgacctgcctgttccccttcaccttccaccatggttgtcagctccctgaggcctcaccagaagcagattccactatgctttctgtgcagcctgcagaactgtgaaccaattaaatctattttcttgtaaatcacccagtctcggatatttctttatagcaatgtaagaataacctaatacagcatgtcaaaactaaacattcaaattatgttggtttggttttaccctcattcagatctttacgatctcttatctggattattggaatctatttaatattacctgtagggaaaagagagattagactgttactgtgtctacgtagaaaaggaagacataagaaactccattttgacctgtaccctgacaattgctttgccctgagatgctgttaatctgtaactttgccccaatcttgagctcacaaaaacatgtgttgtatggaatcaaggtttaagggatctagggctgtgcaggatgtactttgtcaataaaatatttacagggagtatgcttggtaaaagtcatcgccattctccattctcgataaaccaggggcacaatgcactgcggaaagccgcagggacctctggcctagaaagccaggtattgtccaaggtttctccccatgtgatagcctgcgatatggcctggtgggatgggaaagacctgaccatctcccagcccgacatctgtgaagggtctgtgctgaggaggattagtaaaagagaaaggcctcttgcagttgagataagaggaaggcctctgtctcctgcctttccctgggaacggaatgtctcggtataaaacccgattgtacatttggtcaatcctgagatagaaaaaccgccctgtggcgggaggtgacatgttggcagcaatgctgctctgttattctttactccactgagatgtttgggtggagagaagcataaatctggcctgcgtacacatccaggcatagtaccttcccttgaacttattttctcacatgtttccttgctcacatgttttctttcttctccccaccatcaccctgctttcctgctgcattcctcttgctgagatagtgaaaatagtaattaataaatactgagggaactcagagacgagtgccagtgtgggtcctccgtatgctgagcgccgttcccctgagcccactgttctttctctatactttgtctctgtgtcttatttattttctcagtctctcatcccacctgatgagaaatacccataggtgtggaggggctggcccccttattctttattatacctatttatctacaacattcaataatgcaagcctgattgtgtcaattccttcctttttttcctagagcaatgatgccttcttatttgtatttttaattgacctaatagtcttatatatttgtggagtacaatgtgatattttatataaatatacatgtggaatgattaaatcaagaaaattacacatttctcacctcttattatttttaaggtaaggaaattgaattttgaaatatacattattattaactatagtcaccctgctgtagaatagatctcaaaaaccttattcttcctgtttaactgaaactttgcactttatgactatcacctctttctcaaaatagcgaaaagcacaataagttataagatcagtctcaacaaatgtgtcactgaatagtaaggaagagtgtctccaatgtgtttcttcaataaatacaaaaacaattatgaaatacactattttttttgaaatttatctctccattctatcctgcatcctccatcccaccattctctagtagccacctttctgctttctgcttctatgagtttgacttatttagattacacttataagaaatgatattatagtagttatctttatgtgactggcttatttcacttagcataatgttcttcaggttcatccatgttgactcagatgacaaatttagttttaaagcatgaatagtatttcattgctatcatttgaatgtgttcctcaaaattcatgtattggaaacttgattgtcaatgcaggggcattgggagatggaacttaatggaagaggtttgggtcatggggcatccttctcattaatggattaataataccactatctcaggattggattcctaagaaaagggtgacttcagccttctctctctgtctcactcaccttctcttgctcttctgcttttcaccataagacaatccaacaaggcccttgtcggattctggtccctcaatcttgagtttccagcaccaagaactgtgagccaatatacgtctgttcactataaatgacctggtctctgatgctttgttacagaagcacaaaataggctaagtcatcgactgtgcatatatgccacattttctttttccattcatcaattgatagatatttagctcaattctatgtcttggctattgtgaatattgctgcaatggagatagaaaggcagatatctctttgacatactaatttcaattccttttggaatacagaagtggaacgtattatagttctattttttgctttttgaggaacctcaatatagtttgctataatgtctatactaattgacatcccgaccaatagtttataaaaaattccttttctttgtatactttccaagacttgttatcttttggcttttcaataatagtcattttaataagtgtgaggttaaaaaagaggaagagagaaaaacatagaaaataaacaaattttaaattgatatacaacatctaaatctaaaactttaaagtgaaaatcattaacaaattacatcacctatcccaggcactctaccatgacctctccatcctcgccaccttgtactatccttggttctctgaatatattgtataatatctcaatttaactttttagacagacaaatactacagaccagagtgttcttatcccatggaactctcactgccacacaaacacaccagcttcttatttatctacctggtataatattttccatcttcaaggattatctcaaatttgacctccccaaattacaaatggaattaatcattgtttcctctgtacattaacattcaaacaagcattcgccaattgtgattcattcccagaccaataagtagtttaaaaattattaacaaaatatatataattaataatccaatataaaaattctgataagatattcataaacataaatgaatggagaaagagaacaaaaatagttttaaaatggaaaatgaatataagtttttggtgtttatcttttaaaaacaacaataaattaaacaaggtggaagctaaatacagctgcactatagaaatttatatatatttaactggtgtgagatggtatctcattgtggttttgatttgcatttctctgatggccagtgatgaggagcattttttcatgtgtctgttggctgcataaatgtcttcttttgagaagtgtctgttcatgtccttcgcccacttgttgatggggttgtttgtttttttcttgtaagtttgtttgagttctttgtagattctggatattagccctttgtcagatgagtagattgcaaaaattttctcccattctgtaggttgcctgttcactctgatggtagtttcttttgctgtgcagaagctctttagtttagttagatcccacttgtcaattttggcttttgttgccattgcttttggtgttttagacatgaagtccttgcccatgcctatgtccttaatggtattgcctaggttttcttctagggtttttatggttttaggtctaacatttaagtctttaatccatcttgaattaatttttgtataaggtgtaaggaagggatccagtttcagcttcctacatacggctagccagttttcccagaaccatttattaaatagggaatcacaccagttagaacgatgatcattaaaaagtcaggaaacaacaggtgctggagaggatgtggagaaataggaacacttttacactgttggtgggactgtaaactagttcaatcattgtggaagacaatgtagggattcctcaaggatctagaactagaaataccatttgacccagccatcccattactgggtatatacccaaaggattataaatcatgctgctataaagacacatgcacatgtatgtttattgcagcactattcacaatagcaaagacttggaaccaacccaaatgtccatcaatgacagactggattaagaaaatgtggcacatatacaccatggaatactatgcagccataaaaaatgatgagttcatgtcctttgtaaggacatggatgaaactggaaaccatcattctcagcaaactatcgcaatgacaaaaaaccaaacactgcgtgttctcactcataggtaggaattgaacaatgagaacacttggatacaggaaggagaacatcacacaccggggactgttgtggggtggggggagatatacctaatgtaaatgacgagttaaagggggtagtacaccaacatggcacatgtatacatatgtaaccaacctgcacgttgtgcacatgtaccctagaacttaaagtataataataaaaaaaagaaatttatatgtatttatatatatttaaaaggaaaaaatagctaaaaatactcagcagatataaaataaaattttaagtataacctccattaatcaagggagcactagctgactaacagataaattagcatcttaagaaaatgaaaatatattttctactcatgagcagtccaaaatagctcttcctgacatgaaaacacgtctcctccaattggcggtttaaatactcaaacacctttcatctcgtagctccacaaacttcaatgagtggctttcaagaagaataaacatggggaaataatatgtgtgaatttttatatgagtcatgtctaaacatagcatacatccactaggtgtatttatttcattgactagaaccaatctaattgcaggcaaatttgagaactatagtctaatgataatattagaagtgaaaggaaattcagttaaaaattagctatattttgtcacatcatacaattttacagcttataaaattgaaattattatttaaaattaaaatataaatttaaaagcagagacattttcatacatttttagataaataaactcatctgtcataagacctgtaaatttgtgattccaagtacaggttctatgctgccaaacattaacccatctcctttaatttcatattaacttagtgagatgggttgaactctaacagtaaaaaagataattcttctacaaaaagtaaaccatgtgtttcaagaatcacagcagtcatatgaaaccaaagtggtagtctatttgacagcatggcaccattaaaaacacacagattttgtggcttgttatagtggatgttataatgcactggtcataagcatatcccttcaagacgaaagaatttatttttctagttgttgtcatgtacctggatgatagccttcaactgacaactctctatggaaagtgccttggctatagagtgctaccatgggtattgacaagccacctacaaggggcagccttcattcaaagattgtgatacagtggtataaaggttctacttcttccctcattttgaaataactctcaagggccattgttgtttggctgacaccttatttgaggctgtattgcatcctaaattatcctttgacctaatactacatctttttctaatcgcacaagaaagccttctctgattaaatttcatatgctaatcttctctgggtccacatcctaaggaactttaccttcaattgttggtacaagaagtgggagaaaaaaagtagaatattaattggaattttctagctgggtcatatattggtcagataacaataggaagtctattactagtagtaattggagcacagatacattctgacacatagtagtgcggttgtttaaattttcacaggcacaggtcttatatcctatatatgagttaaagttaaattatcagggcttggtgatataggtaaggagtaatatttataaggataatagaattatgtgcttttgcagggggtaattgatgttttgagcaatgataatgaaagtctgagtgtgattatcacctaaagtctgggtgagaaatctagaaagcctccctcacagcatataaagagactcatcttatgcagtcagaaagcaaataaagctgaggagcaggtctgaggtttaataagaaaaggagagcttgggagaaggttgatctttccatctaaggtgcgctgatatcctaagattagggccttagttagtgttacatgtgaaaatgttgactttctatatactccagtacctgctgaaatgaccaacttctcttttaaaggctagcactctcctctgctccatgaaaatgtgcatgatgagataatgcatacaccccttcaaggatctgttactacatagtttcctgtacaccagaccataaactggattaattgacaacataacttttcaaggtaaatttcaccaattaagaaagacaaagtatcatgaaggagccgcaggacctaaacaacatgtactggtaggaaatggaagagtatctatctctactatctatctatctatctatctatctatctatctatctatctatctatcataagatattaactttctagatcaaaggaggtagaatatatagtttaataagggataattaattaaagtatatttgaagcattttcctagaattaaacatataacattctgataccttccccggccatgttgctttcctgttgctaccatagatttcagaaccttggacagagtgagggtctattatgagaattgccgaaattgccatctcatatgataaaagaataaatgaaaagtttcagaataataggcaagctagagagaatatacaatgtaggccagaaaactcaacaaagaactcttgtctctaggagggcctaaatttaccaaaacaataaaaacaatgtgcttaaaagagtaaaataagcacccataagaagttcagtgttggatcttctctgtagataagagctaactttagaaaactctattatagaattggactcattgatagcaatggagacaatgacagaatcccaaaattatagaagccagctggcagtatattactgtctgaagcaagacagtagaaattgtaatatgagtcaaggttggagggatagccagggagcctaactcacagagagttgtggggatgattagagagcacagtatccttaagggaaaaatagatgggcaaccactctaatatttataatttctttgtcaatttttagacctgggccagttttccaacctgattgtcactgacaaaggaagaggttttgtctctaaaaggacagttcctgcaatactagagtaaatatatgataattccccagtccttcccctaggaaatctaaagccatttgtcaggtaattatacagtgagaaaagaaactcctccaagttttgaggacgattgaacacaggatccaagctaacatttatactgttcatgtgaagccttaacatggatcccttattagaatgagtcatgtgagagccaaataataaataagagtcctggcccaggtctggctagtggatccacttgtttgatggattcacctggtgatcctttttggggttccaactgtcaatcaaaatgggcatatagtttgcagtttgcaaaaatctctttattagttccttagtcaatgaggttacattattacagtggggaaaaccaagtagaattctttgaaattcctccacttaccatctgagataggaaataatatttaccacagtaaatatgaatcagtcagagacacctgcaaaaataataagatataagagtagtggttaccctcgtatctccatttattttgtgaaatttgccactacaggctcattgaagatggattgtcgagaatgacggtacactcccacaaactcagccaagtgaaaaactcccttgcagtgcaggatgtgctttgtgtgcatggtttcagatacatgataagtggccatttatccaacgaatatgttctttacatttatatttaaaagacaactcagaaatagttcacatttattgttccagagggcaggggataagccctatgaagcctcagacctgcagcctcaatgacattttcgaggctgatgatctgaaactttctagcacctgtcctcttaagctctagttttgactgggaggaagggagattttgtgcccgagtgtgtatttgacaatatctaggggtatttttggttgttacaagtagggaggcatactattagaattgaccaggtagagtccaggaatcctataatgcatagagcagaccctcaaaaaaaaaaaaaaatacttgactgcccaaaatgttgatagttaaaggttgcaaagccctgctctgaagtaagggactttttttttttttttagacagtcttgccctgtcactcaggctggagtgcaatggcacaatctcagctcactgcaacttccacatcctgggttcaagtgattttcctgcctcagcccctgagtagctgggactacatgtgcccgccaccatgcccagctaatttttgtatttttagtagagatggggttttaccatgttggtcaggctggtctcaaactccctacttcatgtgatccacctgcttcggcctcccaaagtgctgggatcacagggataagccaaagtacccagcctgtaagggacaatttattctattgcacactttgcaacatgaagggttactacttttggaagacttcatgttctctcagagcaattctaaacagctatgtccattttagaaatcttcatgggattggtcacagcctttgttaagcctgcatgacagccatgcttctccctcaacccgcttccttcacatccccaaaaggacttgatttcaagaacataccctaaaaaatttttgcttgttaacctccatctcagactcttcttccaaggagacccaacctgcaataacaaataagaactttaatttctgatttagcttcttagtagctgaattaccctgattatttcaactagcatttctgagcatcaggtttgtcattaataaaatgaaaataataataatcttattacaatattatttaatgagatgatatgttatgcaacaatgacttaataagccatagtactagacttctatcatctaactgaagtattttggtttagaaaaggaaaggaataaaacctttaatatttaaaggtaataaagagtaggtttactacaatagcatatgtagtaaattcacatcgaaagacattgtaattcttaagaatattaacattttgcttcctttaaattaggtaataattttttttaattcctgtaaatttatttggatttctctggcaattccttgttttccactttttgttctagaatgaaagctccaatttagttatttaatccaaaaataatgctgttttttttacctacaaaataattatttttaaagcagttatttatacaaaataatttaagtaatacaatctaaagtctatgtcaacccctaacttgccagacaatttgtaaaggattcaaaatatacctgaacatgaaactgcattggcttcaaggcctatctaattacaaattacacatagaattttaaaatattcatatttgtaaatactgtaaattttctaaacattactatgtcactattttacatacaatcaagaaagcatataattaaatctaattaatattaatggtagcaaaatgagaaaaataaacacaaatgaatcccattaagagcaacagccaaattaaatttaaaattttatttaaataacaaccaaaaatattgctttaccaaaaaaattaaaaataatttaataataaagagcataagttttaattacttcatgccacataataaatgcaatttttaatatttcaaataaatatgccagtgtattataagaaattgataatataatagccttagtacaaataaataaaattaaaaaaactttaactttggccaaacttttcacaaaaagcatttattctagtaaaaaaaagcgatttgacaaatatttaaaagtataattaaagtgtgaattgttaacaaacagtaaaggtgcctcataggaatgtaaaagtaatgtagaatagtaataagaataactaaatcaaaatgttagtgataattagaaattattaagttaaagttctaatcataaaatataatgatttgaacctatgttttaattttattattactgattttttcaacttttcatgtcaaatacactaattatatcagcatgtatactttttaaataaaactgaataatgaaatttaatgggcaagaagaggatgagggcagaaatgccaatgatattgatctgaatatgagacaactacagtcacaataatgttgacttttactctttggtctatacagagtcatagactctaaagttgagttatgatgttggctgagaatttcattaaacgcaaggaaagaatgaattgaacacttattgagtaccaaatgttacttaccagatacctaacttattattttcttatttaataccaatagccattagtaataatcacaaaagcatcattttcatttcatacatgaaaaaattgaggttgagtgagattaaataatatgctcagtgtcaacagatagacatttttggaattgagagtcaaacaggcttgttgaattggacagtccctgctttctttattaaccaagatttttctatttaagttctttctagtttttttgtaaagataataaattattttcaaaagctacctacagctgacacactatttatcagggaaaaaggtggcatggtacaatacagtatatcatccatccactgcataatgcaaaacaggagccatatggggggtaaccatattagtattattgttctctcctgactttgaacagtagctgcagcttgagccttaaataacacagagcacaagtggtcccaggacattgtactttggttatacatagctaaattttgctgtcactgttttggtaaagatctaaaacctcttgttctcttcagcacaccctcgggatgagacaaattttctgattaactggcatttctccctctcctgagttctgatatttagacgttaaatactcttcttatactttgccttttctccagccatctatttagatgacatctttcatacttaagttaaagatctttgaggataggtagagattgagcttttcactcttttgtatccctcacaaaatccaggtgtgccttgagcacaacgggaacctgactcgttgatagctaaattcattgaaactcatgtttttgtttgctttcagccaccaatcctcacgataatatataatgtcatttattttgtgcagatgatacattagaaaataacaatgcataataatgcaagttccattatttaatgttttgttgatacagtcttgatgatgttaataaaaatgtattatcaggaagacagcttttgcgttcatgaaatacaacccattgtcatttagttgttgaatgtaatttgaactgttttccacgagctcataaccagtatcagcttttaacattcagcagtaaaacagaagcagcaataaaaataaaacttaatattttattcaaaatattatcatcaaattatgactcttgcataagactggagaagacttggtttcttttaaaattattttcttccatttcctcaaaaaattgtttctcaatggatttattaatttttagacacatgtaattaatgtctcagaaattttaatttcttatacaagttttgcctaaattttcatagaataaagacattttttcctgtttcgtagtatttacatttaaatgaaagaaatgtaaaaaacatataatggaattaacactgacttttggagttagaagatctgttttagtgtagtttcttccattacataaaaattaatccttagctaaatattttttttttgtttccttcaaaatttaacacaccagttacctgggattgtttgtggaagttaagaaatgtagatgaggtgaaagtgatttgcatgttgcaaaatttacatatcaattatttaattttggatatcaggtgtttgactattgagacttaggaaacagcataattttagtaatttgtaaaatttaatagtgtttaatctttcttttttttggtagaattttgttgcagtattttttccaatatttttaagtatggtaaaacagacgcaacatataatttaccgtcttatcatttttaagcatacagttcaatggtattaaatacattcataatgttgtgcaaatatcactaagatccgtcttcataacatttttcatttttggaaatctgaaactttatacccactaaacaatgactctacattttctcagccactgccaatggccattctactttgtgactctatgatttgactactttatgtatctgatataagtggactcatgaaatactggctttttgtgacttacttattttactgaacataatgccctccaagattatgtatgttgtagcatatgtcagaatgtcttctctttttaaggttaaatagtattacctgcatagactacatttattacattttgtttattcattcattcattcattcattgatgtttgagttgcttctacattttagctattgtgaataatgctgctataaactgttctttagggtatgtagtcagaattggaactgctgaattatatgacaattctatttttaatttttgaagtaacatctgtaccattttatattcccaccaacagtgcacaagagttccaatgttttcacatccttgccagtgctcattttctgtttttcatttgtttatttttgaaagtagtcatcctaatggataatagatagtatctaattgtagattttatttgcattttcctaatgtttagtgatgttgaatattttttcatgtgcttattgaccacttgtccttcttcatcttctttggagaaatgtttattcaagtcctttgcccatttctgaattttgttgtttgatttatgtgattgagttttgagagttctctacatattctatatattaacccattatcagatgtatgacatgtaaatattttctcccatcctatgggttgccatttcactctactgatagtgtctgttaaagcacacatttattaatttttataatgtccaactgtctattttttattttgttgcctgctcatttgtagtcatattttaaaagtcaatgccaaatttaatgttgtgaagctttgcactacattttctcctgaaaagttttatagtttcagtcttacattttagtctttgaccatttgaattcatttttatatatggtgttacaaaagggttcaacttatcattttgcatgtaaacgtccaggttttccctgcaccatttgttgaaaacattattgttgctttcattgaatagtgttggtactcccatcaataattatttgactgtatatgtaaatgtttatttctaggatctctacctgtttcattggtctatatgtctgcctttatgccagtaccctaacattttgattactgtagctttgtagtgaattttgaaatcaggaaatatgaatcctccagctttgttctttttcaatattattttgactgctcagtctcttgagactatttatgcaaaataggtcattggtattttgatagggattgcattaaatctgcagatcactttgggtactataaacagcttactattaaatctttcaatcgataaatacaaaacatgtttttatttatttatgtcttcttcaatgtcttttggcattctcttccagtttttattgtacaaaactttcaccctcttggttaatgcctaagtattgtattctttacatgctagtatacactgaattatttttataattttcttttaagaatgtgcattatttttatgtaaaaatgaaactttttggtggtaactgtatcttgctactttgctgaattcatgtattacttctaacagttttttctgaactctttagagttttctagagataagatcatatcatctgcaaacagataattttatttcgttatttccaactgcatgccttcatttatttttcttgtgtgattactctgactagaacttcctgtactatgctgaatagaagggataaaactagtcatgcttgccttgttcctgattttagaggaaaagctttcagtctttcaccattatgatgatcactgtgggtttttaaaaatatatgattttattatgctgaggtagttttcttctactcatagtttgttgtttttatcataaaaacaacaattatgtcaaatgcttttccgcatcagttgaaatgaccatgtgtgtgtgtttttcatacttggaatgtggtgtattacattaattatatatgatgagtcattattgcattccagaaacaaatctcaaattgtatagtactttgaatttgaattttagtactttcttatattgtatagtactttgaatgaatgtggttctgagtttggttggctagcgtttttacatcaatgttcacatgaaacatttgtctgtagttttcttataatgtctttgtcgggtttcaatagcaggctaatgtgatttcttcttttatttattgattgtttaagaatgtgtagtttattcattattttatctctgacaatctctgcttctaaattagcatgtttagactatctgcatttaaaatgattatggctatagttagattaatatctctaaagtttgttaatgcccttaacaaattaacagtagttattttaagtgtcctgcctgataatcccaaagtgtgtgttttatctaagtttggttcttaagcttgcttttttaaaaaaagaaattaatatgtctgcatttgtccattctcacattcctataagaactgcctgagactgggtaatttataaagcaaagaggtttaattgactcacagttccatatgactatggaggcctcaggaagcttacaatcatggcggaagggaagaagaggcatgcaccttcctcacaaggtggcaggagagagaacgaccaaagaagtaacttatcaaacacttataaaccatcagatcttgtgagaactcactcacttattatgagaacagtatagagaaacctaccacatgatccaattacctctacctggtctcttccttgacaggtagtaattatgggaactacaactcaagatgagatttgggtggggacaggaagcctaaacatatcaatacctaataatgtttggttgaaagctggacatgatgtattgggtaacagtaactgagctaaacaggctttaatggaaggttttatgttagcctggcttggagctgggctgtatttaatgttggcattatatgtacacagatttcaaattcctctggtgaccttatttttgtctcccctgttgattttgggatcccttaagtactagtctcataaagtctgtgtcttgcagctatttcagctataatccactgtttttctactgagtctttactggcctgggggtaaattgtggggtagagaaaccagtgtgtaatcttattattaaatctcattcttttaatgtatctattttcctgtgctgtgactttcacaagtgtttcttagcttttcttcttcctttaggtgaaacagaaaatctagaggattttagactggagaaattaccttttcttaaggtggaataaggctctagttaaacggtttctcttgggagtaagcctttgttatggagaagactttgggtgtatttcagaactgtttcttttcccctctctctgccagaaccaataggaaattattctcagatatttactagggactcttggagagattgcccataaatatatatcctacccacctgaaaactgcagcccctagtttatcattcttacaccagtccacactttgcatctagtaatttgttaatttgttcaacttgtcagaagtgtttgaaccagaggaactccattttatataggggctggataaaatgaggctcagacccacttggctgcattcccagaaggttaggcattctaagtcacaggatgagataggaggttggctcaagatacaagtcgttaaagaggcccacgaaacccaccaaaaccaagatggcgatgaaagtgacttctggttgtcctcactgctcattatatgctaattgtaagtcattagcatgctaaaagacattcccgccatcaccatgacagtttacaaatgctatggcaatgtcaggaagttactctatgtggtctaaaaaggggatgaaccctcagttctgggaattgcctttcccagaaaactcatgaataatccaccccttatttagcatataatcaagaaataactataagtataattagttgagcagcccacaccactgctctgcctatggagtggccgttcctttattcctttacgattttaataaacttgctttaactttatggactcacctccaattcgttcttgcacaaggtccaagaaccctctcttggggtcttgagtgggacccctttctggtgaaaaagttaccattcatgtcttcctatcagtgtagaaagacagggagagtctccaggaactataagaatgtaatcaacttgagcaatcagcctgttttatggctttgcagcctgtttttgtaaccactcaatgagttcttgcccactgctcagatggagccaatttatgaagacaggggaattgccatagagaaagagtttaattcacacagagccagctaaatggaagaccagagttttattactcaatttatctctcccaaaatttggagactgcgttttttaaggctaatttggtgagcagtgggccagggagttgggagtgctgattggtcaggtaggtgacaaaatcaagagggtcaaagtgggtactttttcctgtcttctgttcctgggtggattcacagaactggttgagctagattacaggtctgggtggtgccagctggcgctctgaatgcaggatctagaaagtatcttaagcaccaatattagattttacagtagtgatattattcctgggaacaattggggatgttctgaatctagtggtctcttgctgcgtgacccctaaaccataatttcttatcttgtggctaatgtgttagtcttacaaaggcaatctggtcacaggcaagaagggggcttgtttgggaaagggctgttacagtctgtttcaaagtcaaattataaatgaagttcttcccaaagttagttcagcctatgcccaggataacaaggcaggttgagggttagaggtaagatggagtcagttaggttaaatctctttcactgccataattttctcactgtaataatttttttaaacggcggtttcatttttccccaaactctgtgtagaatgtgttcacctaattgcctggagcaagctcctaacagatcctagcaaattacagattaacccaagtaaacttttcctattatcatgctaaaatctccaccctgtgaagagcaacagcttcattatcataacatgcaacctttgtgtgagcataatgacttactgcatctgctcccccccgggacctctcctctacatgcaatgatgcaccctctcccctctcactgccccatgaaaccctctttcagggagacactgccttggagaacacaccccatgcactccttacttgtggaaagtaataaaattcctattgatcgaaacctgcattcttgtggagagtcatttgttactccaggtaaatgaactcccttttttttggtaacattcatttaagattctatgagattcttctccttgtaagcagatctcagctctgattctctgcatgggcacttttttaaggatttccagatttcaaggtaacaatttgcccaacaacctcagctcttcaagaaccaccactgattttcagtttgtacaatcatttcttgttagaagaatataagtgatgactattaagctctttaaaattgcagctgaggccgggcgcggtgctcacgcctgtaatcccagcactttgggaggccgaggcgggcggatcacgaggtcaggagatcgagaccatcccggctaaaacggtgaaaccccgtctctactaaaaatacaaaaaattagccgggcgtagtggcgggcgcctgtagtctcagctacttgggaggctgaggcaggagaatggcgtgaacccgggaggcggagcttgcagtgagccgagatcccgccactgcactccagcctgggcgacagagcgagactccgtctcaaaaaaaaaaaaaaaaaaattgcagctgaagttggaaatccactaatacggattggttaagtgttagcgtttatctttcataaaatttgcttctgcctctgtgaatttaattttttctatgtgacattttatctttcttctattaatttttcagttacttgataaaaaaagctcttgtaatttaataccttttcacatccacttgttggcatttgaaacatccttacattaaattctcatgctactcgtctttttcttgcccagtgagagccagtttagcttacacttgtcaggaagcttccatttccacatttaaccaatttaaccatctatgttctgcttttttctatctgttgagcaggtgcacttctgtgagttccttaaccctacatttcacagtcttgcttagtggggctcaagggtctcagctcctgccatggtgcctggcacctggtaacacagttgatgttcagctgttacaacatgaataatcatcatccagcagtaattattcacaaaagtttattaaaataatataactttattataatatgactattttccaaattatttttgagaatgaagatgatagggaaaggcacctgttaaccgaaaaatataggccatttaaaagtctcttgtttttctggtgtcaacaagttcaatgtgcacactgtgcttttgaactataaacctgagtaaagtacaagaaacatctcattcaattctctcaattttgagttcactcattttagagatagaaaagtgagccccaaagaaacaaagcgaatagcacagactgcacaatcccatgatttataaaccagtactctttcattctatcaccttgccttctgacacctctgaataatttgctagttctagacagataaatggaggctatggattgctacaattttaagtcaaggcagactggaccaataacgttaccaacaatatcccccacagaattatttattacaactattctctgttttgttctgcatcagcaggtccatctggcagtaaaggattgaccaggtgttctgggaaaagttggcacacgaatgccttgaacactgtgatgtgagcaggagggggagatattttcaatgagagaaaattagattattcttgatatgtataaaggtgcaagacatttttaggtgatagcaattatgaaacatctttttgctttatttgtagaggttttttgacttggtttataaaatcagaatgaagtataaatattcaagggaactagagtgtcatccctattagtgtagagaataaacaaaaatctaggtagacatccttgaaaatttgcagtaaaataaaaaaggcatatctcatcagaaccatttgttattctaaagaaaataataataacaaaacctctctcttgattagtctttattagttggtacctgactcagggctttcaatcagatgctcagaatatagtttacaagtgatctttcccttactaaattgaattttgtggcccgaattagttaatccttttcccaaagtgagcaatttcctgtgtattttagcttatcaaagtcaatgaatgtattaagagggcagaattcattctaatactgcagaacttagactgaataacaaatgtagtacaagtccactgaggtttcaagcagtcactaagaagctgtcaccaggcaaagagaatgtttctttgtgtagtgaatccgtacacattaatgagaaacctccattgctggcacccgcggtctgcaatgtccttgactttcattatgtaagaattaattccatggcaaagggcttttatcaagcttgaatgtgcatacaggagtcccccattatttgtggaacatacgattttaggctcccagtggatgcctgaaaccacagatggtaccgaatcctatatccactatgttttctcctatatatatagacctatgataaagtttaatgtatgttaggcacagtaagatattaaaacaataataataaattagaacaattataacaacatactgtagtaaagttttttttttctttccttattaaatcaagaattttcatcctttcacttaaaaggaagaaatttacagcttctctttggcatatccgaattaccagcatcattgttcttgctctttggggccattgttaagtaaaataagagctatttgaacacaagtgctgtgatacctcaacaatgtatctgataactgagacgactaccaattaactaaggggcaggtgggcaggcagcttagagagcatggagctgctggacaaaggaatatgaatcttatcatttctgggtagaacatagttggatggtgcaagatagtatcacactgcacaaaacaacatgcaacttaaaacttattgcttatttctggaattttccatttaatatttttgaactgaggttaacccaaaccatgtgtaactgaaactgtagaaattgaaatcatggataaggaggaactaatactgtatgatatactgtaaaatatccaaccacacaatgtttccataccgctttaagacagaaaaaaaataattttctaagatttggttaatttttatttaacatttatatttatgtattttaaccttttcatcataatcgcctacattttctttaacctgtttcattttgaacattacttagtgattttagaaaaaacaactaaaatgttaaatcaaaattgacgaatctactatttagaaacaacattgacatgtatacctttcttttatatatgaacatatgtgttccttcacatcttttctaaatatgaattttattataacttttgtaacctttctccaacaaattatttgctggtttttaactttattaacggataaagatcttaaacagtaattatcttaaaaaacaagaaaatataaattcaatttaaaaagcatccaaattacacatatatatttccatatgaaataattgaataattccttggaatgaaagatgtcaagctcttagcatccatatttcttcagcatcttctctcttgacctgctaattttgttgcccagactattttaaatttgatagcaatcataacactatattatccagttatatttccaccaggatttattcttgtctttatatttaagtaaatttaatagtcattaccaataaattaccaaggcttctccatcctcaagttctttatattatgttttagattgttgaatttaattaccaagaatttttcttcagaattactcattttatattttctgactcttttatattacagaatgtcagccagttgctttaattcttttatgactattgagatggatgtcatattcttggatcacacttcctttttttcaagacttggcaatcactgctttacttatttttggcaaagaatgtttctgtagagaaatctaaaggctagcctgattttacccttatagctgatgttttcttactacttatgatctaaaaaattatttactttaaagttcactggttttggtgtatataatatgaatctcaattttggcttatctttatcaactttcttggtatgtgatatatcctgaattcttaaaaaattgttctgtatatttttcctgtgaatttagtttctatataatttaaaatatttttttccaaggtatctcgctgaatattatttgtattgtttacttcagggacatcaattaccttatgttgcatcatttttgttttttatataaataatattctgtatattgatgtaatattttgactttccgtctacgttcactatgatttctgaagccttttcctcataacagcaacttgattttccattgcactcattctgtttctttcagtttgtatctttctgtgtttcagtttgttgacttctgttactatctttacattacacatcttttaggtagttattttgtgctgtgattttatgtaagtaattttatcattaatttctttaataactcagtgattttaaggaagttgtctgttgtttgctgtttagtttgtttttgcttctgctattttatgtaacgcatttactcatattttgtgatattccttgtttttataatcatggatagtatgaacagcattctgtaggtcctatgtgtttaatcatagagcaatcaaattgtctttgacagacatcctaatttaacttatacttccagtagcttgaggatgtgtggttagagaggttaaaaggctggcaagcattacagggggctcttttctgtactctaagttgccactggatgtaccctctcccttctgccaggtttctgtcactccctccatgaggtatcccttgtactcccttctcaatccagtgactgattaagttaaatgaccaatgtgcaaattggaactccttgaaaaaataaataaatcaagatgtttcagaacttgaagttagagtacaatgtatgatggccataagaaattgagaaatgcaagtatattaaaattaaagccttttgtatatccaagacactttaataaaagtgaaagctggcagaagttacttgtattacaaataattaagaggattcatatagttttataaagacttcagaattcaaaaataaaaatgctaaatatatgaatagactactggggggtgtaaatgagcacattctttacagaatagtcaatgcgtgtggctaacatacatatgaagagacgtccaaagtcattgacattgaaggaagctggaagcaggactctaatgcgatgtcattttatacccattcaattggcaagtaagaagcctgaaatgcaaaatgtcacagcagataaagattgattcattctctcacgcacttaggggaatagaaaataggaacaaaaaatgaacaatctctttgagtataaaatacagcattattctctagggctggtaaattcatataatctttgagacagagatgtagtacaatgactgtattttgactgtaataggcactcagttagggactgtatatcccagctctcactgtggtagggaaagccatgtgacttgtttactattggaataagagcaacagtgaatgtactagcttgccagggatggccacaaaataccacagactggatgtcttaaacatgagaaatgtattttcttatagttttggacgctagaattccaagatcaaggcatccccagttcagtttctcttgaggcctgtctccttgatttacagaagctattttgtcactctgtcttgacacagccattcttctctatgtgtgcatgtctgctgtatcttacactttattataaagacttcagtcatattggattaagaccccatcttcatgaccttgtttttatctccaaatatagttactttctgaaatactgagatgtgggacatcaatgtgttaattttgtggaaatataattcagttcatcccagtgcggtacaccattattgagccaaggtttctgggagatagatgtgctaccttcatgttctcttgaacttctgataatcatatacacacacacacacgcacacacacacaattatgtggtacaagaggaaagaaaccttgatttctgaattactgaatggagatcaggcacctgctttgaactgatacataagcaagaaagagaggtttaatatatttgagtcatttacatattttggtccatttgttaagttaccttaatctataatgaacataatttaagcctcatgaatatcactcatgcacaaaatcaacttttacacttagtaacagcagatataaagaagaatgttcaggccgggtgaggtgtctcaagcctgtaatcccagcagtttgggaggccgaggcaggcagatcacgaggtcaggagttcgagaccggcctgaccacattgtgaaaccctgcctctactacaaaaattagtcaggcatgatggcatgcgcttgtaatcccagctactcaggaggctgaggcaggagaatcacttgaacccaggaggcagaggttgcactgagccgagatcatgccactgccctccagcctgggcgacagagtgagactccatctcaaaaaaaaaaaaaaaaaagaagactgttcagagcaatattactcatgaggggaaaaaaactagaaacagcctaaattctcatcaatttgagaatgaataaataaattgttgatcattaaaatgatgaaatattgcacagtactaaaaataccaaatatacatacttcaatcacgataaattgtagaaatgtaaaattgagagaaaaatttcacagaaggctgcatacaattttctactgtttttataaacataaaataaataaaacatattttaagtacgcatatatatatttatatgtcataaaatgataaagaatcttgaggccatgataaaaacatcagcttggccacctgctcttcagaagagggaggagggtcggctcaggaaattgtatggagtgcttatgtagtattggtaatactctgtttattgtgttttgtaatgggttctgttttattctttccaagttgcatatgtgaaatacatatatacaatatttattataatattatgtattaagcatttttatttgaataattttaaacatctccaaaataatcattttgtcccttttaaacattgtaatagtaaattacagttggcatggctatatttgtttaaggtctaataaaatttttttaaaaatcaaatttgtcattaacaggttactcagtaagatatcatataattttgaaaataatttggccggccatggtggctcacgcctgtaataccagcactttgggaagccaaggcggcggatggatcccgaggtcgggagattgagaccatcctggctaacgcagggaaaccccgtctctaccaaaaatacaaaaaattagccgggcgtggtggtggacgcctgtagtcccagctaccccggacgctgaggcaggagaatggcgtgaacccaggacgtggagcttgcagtgagccgagatcgcgccactgcactctagcctgagtgacagagtgaggctcagtctcaaaaaaaaaaaaaaaaaaaaattaaataaaataatttcgatgaatataattttgatcaaaattaagttgccaaaaataacattcaacttcatctttatagatgaaagactttgaatttagggtgggattcaaaagtggtaagtagtaaaaataattttaggtgaaaataatataagttgataattaaaaataccatatcgttgcacagagactagttgtctttgccaagaacatcagttaactatcagataaagctaaaattcttgtccttgtgatttagtgattttacaggcaatgcttattgattgaataatagttagcaggttaaatgtttattatttctgactttctaataattataaaatcagttgtatatggtgcataatactggaagggaaagccataaatactaaataatatacatatctaactggcatttctatctctacttgaggtaaaaagtattaacgtgttcaataatatttctgtattccattaagaaatcatgatacatatgtacttctccaaaggattaaaaatcaattcccgtgtagaaaggatcctgtgataattgggattgaattgcaaagaatatccttatgattttatcttgaaagatttttctacaagagtagtggtgtgcacttttattagtttaattaccttgaaatcttaaagacagaagaatttttaaagttagtcaaaatatgggagttaaatatattcattatttttcaattcttcttaaggaggtatgaaggacaattcagaaataaatatttataatgaggattggcttaagaatgcttgacctcagaaaagcacttccattatcctttaagaaaagtgtctacatttcaagattagatactctgattaatttaacatttaatttacaatattggggagtatatttcctaaggaattgatgaaagaagtttcattatttcttacaatttttttatatttttgcatgtttcttagtgtttgtagtctctaaaatgtactcttcaacattgatatttcttgaacattctaccctatttttcatctatttttaattttctctgtttttcattagattcattttgccttaccctcttcattttatcttccttctctaaaatgctaaaataaagaaagggagaaacagctttgttggggccatctctgctattttattttcgatggcaggcattatatcttagtggaaattgtgcagtctttgataaaacatacatccgcttacggaattggatatgttttatacaaatttcaacttcaacttcttcatctgtaaaacagggtaaataatatcgaatttgagttattaaggcaatagaaagaatatatttaaagctcctagaacatattcaatattcagttagtggtagctattattgattatattattggtcttggtatcactaaggagtataggagataaaatatattattaaatgtagaattagaagttagaggtaaaaaaatgagtgatattcagcattgagagatttttataatttggtagtgatagtgataggaagcagagaaattcctgggcagacagggacaggtgcctggtgaaactcaaccttcaagccaaggagagtctaaagtgtacacaaaactaccaatcctggatagagtccgtggaccagggtgggaacttccatttccatttggtgcaatcagcccctcattggttctgggctaagacttcacttcagctctctattgattctttacactcttgtacctctttctgaatggtgctttttccaagcctacccacaaaccaatcagcatacatttcccctttctaagcccataaaaaccacctcgcagccaacaactgactttcaagttccctgttgctcctgagagctttctttctgtcactcaataaaattctcctctgccttactcactctccagtgtctgcacacctcattcctcttggtcgtgagacaagaactcagaacttgctgaaatgcagaagtgaaagagcagtatcactccatcctgctgaactacgggagtgaagaagccacagtaggactttactagaagtgaggattggagaacagaatctttccaaaaggtaagattaccagtgtctcattcttagagaagtttttaaatgaaactacctgatcttgaagcaagaacatagactgagttgaacaacagggaagatcagttgtgaaatctcatacactgctggggcacccagactcaatgctggtgcgcagtgtctggtgatcatgaagcatatgtgttgggttagaagagaaactagcagttggagtcattgactattaatgtaatttctgttttcagaaagtatttcagaactgagtcagtttcagaagcccatcattaatccaatccgggaagaagagaacagaaacattaaaaggaagaccggttctaacttaaatccatgaaaccataactaatttcttatttcaattaagatttcttaacaaaggtttttgcatttacatctacctgaatttaatctacataaacttcaaatttcaccctccaactggttgaaacatacatgtactaaatttagtattatcctaaataagaacaagtgtttctaaaggcacaagttatttatagtgtatccttctaccaactactctgatagaaaaggagattggaggagttaattatgtttcataaaaataaaacatcctagttcataatatttcacatgcatctacaggagagtgagacctgtctttgagaatagaaaagattatgatattatttccataattattttctaaataaactaaagctaagatatacaaatttagagaatacaaattttgacagcactttcaaattttagagacataaaattatacagatatgttttgagacgtaattaaacatactgttaaatacaaattatgatcaccatgtaaacataaaaagcactaacagaaataatgcaaaaaatataaaaatctagatactaacataatttagtaactgaatgaccttgaaaagtagaatagtcattaatttagactaacttgaatgatagctttttctccaattacaaagccaatacatacacattgaatagaaagatagtaacaaaattcaaaagatatgctgtttttttcctactaatagttttattcctatatttttaaattttatttgcaatttacagttgtggatatataattgttgtatgtacttatggggtacatgtgacattttgatacaagcataccatgtgtaatgaccaaattatggtaactgggatatctatcacctcaagcagttattatttctttgtgttagaaacattccaactccattattttagttattttgaaagacacaataaattattgttaactcttagtttccctattgtgctactgaacagtgggtcttatcacttttagctgtatttttgtacccattaacgaacccctctctgcctccccccacaacagtacccgtctaagcctctggtaaccattattctactctttgtctctaaaagtacaatttttttaaagtgtatgttacatgaaataagccaggcacagatagacaaatattacatattctctctaatatacgggaaccaaaaattatttgttttttaagttaacagtgaaatatttcagaatgcaaataggttttgaggaaagtattactataccccaagtgcctctgtgaagctgaagaaacaaatctaacaaaaatgattgaagtcttttttctcctctcccaaatctctctccttctcccacatagttaaacactaaacagaatttggttttcattgtttatgtgccttttctatacttttgctgtgtagtattatatggttatgctaaaactattcttttgcaacctattttttatgcttaacattgtgtttgagatttatccaagtcaacttttttattctagattctttatttcaactgttgtatcacattttatttatataaatatactacaatttatctatgcaaatattaatttgaatctctttttatttaaaatttcaatttaaaatgttaataggaattcttcacaaatagcactgtaatggttatttaacatttaacaacgtgaacataatataagatgcctaatgagtctccattattagatatttgggttaacgtactctctccacttctcccaagaatttagaatattatatagtgcataatagatgcttagtaaaaacatttattttcaaagaataactttctaggttttcattgttataattaataattcaaataaattatacgttacttttcatgtgattatctgacaatttttatgctatattagagagaaggttgttgtaggaaaaaatatacaattatgtaattttctttcctgttcttacactttagaggtagaatttgggaattacatcagctctgcttagcccaaaactttggaaaagagaaattggctgctgactgttggcctacctcatcctttaacaaatgcttgataaacaacctttgctcaaaggtgtcactctgtcactctgaagagcacgtgtaagattaaatttccattggaaaagatgaaagctctttgccacatttacagtgggctcagatctttctattttagcaggaaaaaaaacaagtgccaaactatgctgacttttaaaaaattaatcaaatgatgttcaaatctaatttgtaagaacacttcccttctcccatggggcttaataaaaacacttttattttctcctagggtggtgggaggggttgttgtaaataattacttttatttatcctgaattgattcttgtaaggaataaaagtcacttccaaaggaaagagttaagagccattattgcccagatgagcccaacatcttacaatgtggacaattttcaagcacgaattaccaatgtgaatttgcctggagcaacctgcatctctctctctgcggtccccacccctcatatttatttcttacaataagtgagagctggctgagtgtagcagatatctaggcaaagtaagataactcaaatgaataaaatgtttgtctattgtcagtgttctgttaaccattttaactaactttcatcctagcctttatcttatttgaccttaggacactgtgacctcattggattccttctctattttttcatatataaaaagaataagttgaatattttctatacttgattattacaattccatctttgtcaagtagaccttgaaatgaccccagtaattcccaacttctggtgttcacttcctgcattatcttctccctttgaatgttaattgtttctcatcaatgagatacggtaaagatgaagaaattttggagatgtaattaagatcccaattaagttgcttttgagttaatcaaaagggagattaatctaggtgggtctggttttactgataaaagaactcaaagcgaaaatggatcatccctgaagtaagagtttctctccctctctctatccctttctctctctctctattgctagttttgaagaagcttccatgttgtgagagagcatatggagggggccacgtggcaaggaactgtagtggccactgagtactgagagtgctgagtgctgaacatagaacctcagggcaacagttgcaaagacatgaattccaccaacaacatgaaggccttggaaatggattattctctagtccaggctctgatcaccacagccccagccaacacctgaatttgagccttgtgagaccctggagtagagaacttagctaggatatgcctgacttctgccctacagaaacaaagacataataaatgtgtgctattttaagcttcaagtttgtgatgatttactacacagtatagaaaactaatacaatattacttttctttctgcaacatatgtttccattagtctaacttccatcttgattcaacagatattttttgaattcttatgccaagtgctgttaagaatttatctcacaatcacataggtcagtaaatagcagcgaccagatgggagttcaggcccttttagtcattgctcagtgatcattcccttacaataaacatctgtggatgcactaatccaaatatcaagtgtgtgattgccacaaatatttgagttataagatgttagaaatgtttaatatatatatgcaaaatttggaactgtattgatacttatggaatgttatgctaggaaaagaggttaagtgagccattctttttgtaaatagtcatcaatatttacagaatacctatgttcaatttttgttttgcctgaaggtcaaaaaagaagtgaggatcatatgggaaatataccttcttaagaaaaaagactatgatctccattcacaaaactactaatatatctatgagctctgcttcataatatttctggattttataattaaactttcctatgaattttctaggttatttttgtgaattttctgagatatatttcaaattttgacagggaagcttaaataagttggtttttcagtcaaaattattataatacagctagaaaataatttgaactatattaatggagctgcaataaaattaattgaaaattttatggacaataaaagcataagtggaaatttaaaactagattttgttttaatataatagctttttagaaatctataatgttataataaaatattgtaaaatgaatgatttggacacaatttcctacttgataggatccaaaacttgtgtggagttgaataaaaaagtacattatagatttcctttgctttaatttcattgagaactacattgtagactgcaataaaacagaggtcagattcagagaaaattgcattttactagtggtagcagcaaaaatatgaaccagaatttactacagttttatgagtttttattaatatcagtgatagcactgagaaacaatgatactaattgaattacttatttttgctatacttgaagttttataataaatgagattattccaggagtttaagtttttatttatttcgctgaagatactaaaatctgtttcattaattaataaattagcctatatgttctgttattaatgatgttggtagctgaaatattttgtttattaatggatatatcttttataatgacttctgcaaaacaaagcaaatgcatcgcttatgttccattttcaccatgtagattgcattgtaatttaatatcagcattgctataaaaacttaattggtcacaagacctgagtaaactggaaaataatggcattttcaccaggatgtttttgagactgttctaatatagtgaaagcaagcaaaaattgaagtaaaactgtcaatcagtaggtttctttttttttttttttttttttttgagagggagtctcgctctgtcgcccaggctggagtgcagtggcgcagtctcggctcactgcaagctccgcctcccgggttcacgccattctcctgcctcagcctcccgagtagctgggattacaggcgcccgccaccacgcccggctaattttttgtatttttagtagagaccgggtttcacatgttagccaggatggtctcgatctcctgacctcgtgatccgcctgccttggcctcccaaagtgctgggattacaggcgtgagccaccgcgcctggccagtcagtagttttctttaaaatgcctttgctgaatgactttataaatggagtgaactaggtttcaacaacttttgtttctctaacagcatgtaatgttttatcattatcatgttgtagttgatgtttttgggataaaaattccacatatttttagaattaagtgtatgtatcttaaatcttgtaattattttgagaataggagacaaaaaaattgaagaaattctatcactaataatagtgagcaaaactggtaagcttatacaaagaagatcatttgttatgcaatagacaattttttatttttttttagttgcttgctatttttttcccatctgtaagccttcttgaggtcagaaggatagtttattgctctttatctttttggcaattagggaactatctgacttgaattttgattagaattgaaccaggttttctgtttttgttttataggagacaagttcttgctctattgcccaggctggagtacagtggtatgatcatagttcactgtaaccctaaaccctaaaaatttttaaatttttaaaatgcatggctaagtttctaattttttgtacagatgaggtcctgctatttgtcccaggcttgcctttaactctttgtctcaagtaatcctcccacctaggccacccaaagtgctgggaatataggtctgagccattgctcccagcctaaactgggttgttaataaaattcctgaaaaaaaatgaatcaaattttcatcaggacagtgaaattaacatatttatcataatctttgccaaattaaaaataataggacttatattgggggccaaggtcatctactttatagtgcttgagtattttttgtgcttatggcctctctatatatggaggaagcatattttcttaaatttattaagttcttctctatggtacataacaatcttcattattctaaagttttatttttctgaatcctaaaagattgagtctcctaaacaaatcattaactatttgcatatttacccaaccaaggcgatctgagctgccagctcagtagtaacatattctctaggctccagtgagcgggatccaatggtaatggcagagtaatctaaatttcagatttggcatacgagatacatacattaacccttcaaataactgccaaagtaataggcaaaactatgacctatgccagcctctaccacttctaaaatggtatgacaaaaccatacctacccaagtgttttatgaaaaataaaataagacactggtcacaacattataagaaatttaaactgcattgtttaacttaataatattttattatgatgatgcagattagcaatgaatgtaatacgcatataagcaattaagaatcagttatagagttaacaattatgtgattatgatgttaacctatatcaattagctagtccatttaaaaacatatttgcagattttcatatattttacttaaccttaaaagtcatggttagagataatttccccaaattattgaattatctaatcaatgtgatattctccaatatttggtagataaaacactactggtggtcttcagggtttagctatcttattcttgcctagaattttaaagatataattagtcatataaataaaatgttttgattttcttttgtatacataagcagtgactgtaggatatcaaaagcaggtatgtaaaagcaattgttaatatttcctaatattatggatattgattataatgtcaccactacagggttttacttcattggaaattaatagattgtgaaatataaagattacttatcattctgaattcagtgtgcatcagaatgactgttttagtaagacattcttttaaaataaatcaggaggtgaatcttttggtgatgttgaagaaaaattatttaattatacttgttaaagcacagaaaggaagactttattcaggaccatcatgatgtaggcaccattgcaatgggattttgcggttggggagagactgggctcaactctgaatacagcatgagaaaatgagaatttatagccaaggagcagggtggggatcagtggatagaaagttactaagaggaaacatcaggggtaagatggaatgtaactaaaccgacctaacagtatttttgctgaagacaggccagaacaatcagatatcagctggggaattgaagagaatgaggaacccagtcagatcatgagggtgatcagatattaaaggtgagggctgatgcttgttaaactgacttgtaattttgctaaaacaagattttacaagaaagtgcatagatggtgctaagagatggttctgcagcatgactaatgtttggtcacgcagagtctttgtagtggcaaattctcagagaaatatttttagcggtactgttatttgaaaagggtgatggctaaaaggcttgttggatgaggcaattttcagtggtccttgagcatcccagcagtaactgtgcagtaactgtgttacactgcaaggtttgtctgtctcctgaaactgaccagtctctgcatttagtcacataggtgatgaagtattcaaagcgaccgaagtataaataccttataattgctcctcccttcgtactggcttgcttgttgcttgtgaaaatatttgttgcttgctatgatgcttggtccttgcgtaaaaagtgctaggccttggaactgcatttctcacctgcagcacagcccactgtatgcctaatatccatctgggctggtggtatctccttggagacatggaggtaaggtctttgcttatgctcctgatgtacacagttctttgaataataaactatctggccctggtccattgagtttcattgtccactttccacggaataaccatgcttttatagcaagccaacctgctttcatgcctagttacatgttttgtagttttgttgtgctttggtatcttccagaagattggggtccttccttgacaactcttctggatattttttctcttctgcgaacaattcatttttttactatctttaaatcttaattactatttagtaattaaatgtaattatcttgcatcagatatgttccatttcaaaattaattttagaaaaaatatttaccacaaactggtgaaaatttggcttgttatccctgttaacattgatttttacatttaatttaatttactttttaaattttttttcctttttaacttttattttagaatcatgggatacatgtgcaggtttgttaaaaaggtttattgcataatgctgaggtttagggtgtgattgaacctgtcaccaagtgtattagtccattttcacactgctaaaaacaactacctgagactgggtaatttacaaagaaaagaggtttaattgactcacatttctgcattgctgggaggcctcaggaaactcacaatcatggtggaaggcgacggggaagcacatcttacatggcagtgggagagagagagagtgaagggggaagtgccacacttttaaaccatcagatcttgtgagaactcactcactatcatgagaacagcagggggaaaatctgctcccatgatttcatcacctcccacgaggtccctcccctgacatgtggagattacaatttaacatgagatttgagtggggaaagagccaaaccatatcatccaggtagtgagcatagtacctaataggtagttttccagcccttgtatccctcccttcatccccagtctaatagtcccctgtgtctattgttcctatgtttatgtccatgagtatccaatgtttatctcccacttataaatgagaacatgtggtacatggttttctgtttctgcattagttcgcttacgataatggcctccaaatgcatccatgttgctgcaaaagacataattttgtgtatttgtatggccacatagtatatgtaccatattttctttatccagtccaccattgctgggcacctgagtcgatttcatcattttgctattttacatagtgctgagatgaacatacgggtgcaaatgtccttttggtagaataatttatcctcctatgggtatatacttagtaatgggattgctgggtcaaatggtcaactaccattttttaagaaatctccaaactgctctcctcaatggctggaataattcacatttccaccaatagtgtataagtgtcccattttctctgcagctttgccaatatctgttttttttttttaattattttttactttttaacaaacactcttctgactggtgtgaggtggtatcccattgtggttttgatttgcatttttctgatgattagtgatgatcagcgcttttttatgtttgttggccacttatatgtcttcttttgagaattgtcttttcatattctttacccactttttaataaggttatttggtttttattcactaatttgtttaagttctttatgggttctggattttagacctttgttggatgcatagctggtgaatattttctccaatttggtaggttgtctgcatacttccttgatagtttttctcgatgtgaaaaagctctttagtttaattaggtcccatttataaattttcattctgttgaaattgcttttgagaacttagccataaattctttgtaaaggccaatatcaagaagactgtttcctaggttttcttcttttacagtttggggttttaagtctctaatccatcttgagttaatgtacatggtgataagtagaagtctaatttccttcttcctcctatggctagtaagttatcccagtaacatttatttagtagggaggcttttcctgtttgcttatttttgtcaaggttttcaaagatcagatggtcgtaggtatgtggcttcatttcttggtcctctattctgttccattggtctatgtgcctatttttatactagtaccatgctgtatttgttgctgtatccttgtagtatagtttgaagtcaggtattgtgatgcctccacaacattgattttaatactcaagtaatgttgtcagacaagccactgtcctttacgttagagaaaaaagaaataatgattctctaaaccatagcataaaatgtggaaatttgtgttttagccactaactaggactggaattctgtaacactctgaaaatttacatttttcttcatcttagttttctcaagaggttgtttacagccttcaagttttaaaatgacaagtaccatgtgtcaggtgctgtgtttatacattgcactgtgagcatcagaatgagtaggactcattgcaaaacttagtatttttagaatctatagaatctctaagaaatgtcaatttaataattttaaactttataaatatcatcattgtcttataatctgttgtgtggtatttatttctcctactgatattaatcaaatgctgattatgtgctgggcattgtgcaacgtgcttaggagccagctgtcactgatatcaacacagtgcttcatctcatggagcttcctgttttatggaaagggacatttttaagacaaacacacaccactgtacttcatgaaatggaagaacagagggatttagaaacataatggggacgccaaataattggattttcaatatattaaaagtgtttattatgtacccatagaatgtgttccttttgggttcatcttctgtctagaacagatgtttttgctatcatttcacaaaataatgatttgctacaatcagttgatatgcagatgttgctctttttaaaagattgctattttgattttactcttttcattttacatttccctgatagtatcttcaaaagggttaaaaaattggtatcacaaggagacaattatctatgggtttcttacatttttgtatgtcttgtaaggaaaataactaactgctttgttctgacctatcttttcaaggatgtctgtatagcaaacagccttggatgatctagtgtccacctcgaccccaccccacctcacttcagagcaaaccctggatttttaaaatgttaaaggataaagtacctttctctggagcaagtggcatgcatgcattcattggtctctctggagcaagtttggcaggatatgcatcccaaaatacaccattttggtatagagattcttttgagctttagcacttgaaaaacagcagatacaagaaagacattgtaatttccttcatcataaaaacctgagatgaaaactcctcttataaatgatgtcctccctaggccgggcacagtggcttacgcctgtaatcccagcactttgggaggccgaggcgggcggatcacgaggtcaggagattgagaccatcctggctaacacagtgaaaccctgtctctactaaaaatacaaaaaattagccaggcatggtggtgggcgcctgtagtcccagctacttgggaggctgaggcaagaaaatggcgtgaacctgggaggcggagcttgcagtgagccgagattgtgcctctgcactccagcctgggtgacaaagcaagactccatctcaaaaaaaaaaaaaaaaaaaaaagatgtcctccctataccagaaagaagcaatattcttcaaagagaaatcagagctaagaaaattctgtataaacagactgttaaagtaattattatattcctttagcctgttgtggaaaattcagttactttttcacaattctcccttttgttcaacctaatataaaagcatttaggttttgctagttctttgagtctttatttcattatgatggttcccatgtcatataaacttatattcaatttgtatgcttttcttctgttaatctatcttatgtcaatttaatttttaggctcagtcagggtcccaagaagttaaaagtaaaatttgcctcccctgtctatgcatactaccctgcattaaaaatgtggattttgtaacttcgtgtttctcttctataatataatccactttgtgggtaggtgtcacttgtctttttgcctcagctggtgaaaattgaaatgcaaatgctaatattctggttattggtgttggagtgagtaataaactattatttgtttctaataaagattgtacatatctgaaactatggcaagctaacttattaatttgcaaatagggtaaaaaatttagatactttacagtttttaatatcatatcagagccattggggattgcaaacacagatgggacatttttacatgtgatattatcaatcatgttgatcaaaggaatagagaggaataaccaggttaagcaatgctgatctagaagttttaaatataagtcacaattatacttccattttctccaaaatgctaagagatatatatgctatatgcattagaatttgagacaagattctaaaagattctaaaacatttttttccaattttatttgtccttactctttgccttcaccattgtgctttttgttttgttttgttttgagatggagtctcactttgtcacccattgcccaggctggagagcaatggcaagatcataactcactgcagccttgaactcttgagctcaagtgagcctcctgcctcagcatcctgagtagctggtagtacaggacagatatgtgtcaccatgcagagcatctcatgcttccttttcattcacggagataaggaccctcatacaattggacctcgttggaggagtgtatgtgtgtgtctggccgtgagggtagatccatatccttacacttttttaaccaactatttttgttacaaatataaatggttaaaaatacttagagttttcatacttctctgccaagccattgggtctcttgtatctgcataagggcccgctgaggatggatcccagtagaatagattacacaactttcatacaaactttaaccagagtaactttgcctttcttcatgttacgtgttgtatttttaaaaacacaagaaaagagctcttcagataatagaaatttacaaaccactgttccttcaaaattcaaaagctcactttattgagtgaagccaatatgtttataaggctttatctgttattaatctgatgacactagtaatcccgtacatatgtattcatttcttaaatttagagactattccaataaaattttcaccaagcagataacaggattacttttatttaaaaacctgtcattctaaattacagcagtctcctttagaggcaaataaactgcaggaaggataaactaatatctcagtgtcttatttctgttattttaaatattaatattttagaactaacagtgatactccattgaatgaaaagcattttggtggggtacaaatgctcaaaaaaaattcaatggggttaatctttgaagcagaggaaaaataaactgcatgattgtcttactcctactgataaggttgatccactttgaaagcttatcagtacgtagtattgtcaaagacattcataattaaagtccaaattgtgtgatttataatgttcacagcagttgcttttgattttcttgctatctttattcctgcttcattatgaatacatttgtctaatacattttaatttcgtttagtagctctttcctaagaatataaaagtcccataccaacattgacttttttaaaaaaacttttaagttcaaggatacatgtgcaggtgtgttacataggtaaacattgacttgtaaagtttcacactttcattaggtttatgctcatattggaatgtttaccagctgttccttttgccatcataattattcaaacctgattttcatgtgcatgacaaaaataggcaatttctataatattttaatcaattataaatgaaagaataatttctcgttattcactagaaccatggattttaccgtatggtcattattttttcaatcatcaagctttttaaaagtatagtgaatacaaaatattccagactttcttaaagcatgaaatttgaccaaaaccattaagatttattattaactttggtaataaatacaaattaaatatatagaaatgaaaacaaaaatacattaaaatgacttaacggtcaaaagttcaacacgtcaaaaactgttcacataagaaacaagtgaaatggtagataaaatcagctatggttatctgatacctactaataaacacacataacacctgacatccacagaaggctcttgaatgttgagataggggtattatatttaaaaattatgttgattttttttaatgttttatcttttagcctaggttgttctggaacaccttggctacttttgatgtttctagatacacatattccaattttctctttttaaaaatatggaaattcatactgatttatttagtaccatccaactaattatggatagggcaaagaccagaatccaagacttttacattaatttcaatattttgggatgcttttccagctgtatagtagtcatttttgcatgacaagttattgtcatcaaaccagcattggttgtaaacaaacccctaacagttcatcgcaacattttatcagtactatcacttctagggagggtgtacatagcaagaccagtgaatttcatgatagttaagtccattcccttgatgcttcagttgtaaaatggttcgttgttaaggggcagtgatgtgtgaataccatgatgctgaatgagtatgaaacaaaaccaattaaagtcatgctaaaaataattctgggcaacttaaaagcatctataatataatgtttgatagatgtttttagtgattcactgaatcactatttcagtgaagatggattattgtctgtatccttctccacaaggtgatgagagaaattcaatataattaaacggccattgggtgtcagactggtcctcttgggaaatggcagttttgaatattagtcactcagctagatatgccttacttaagggaagatcttgttgttgacctcatgtgtaacattcatcccttctgaattttcgcaggttttatctcccaccatttgacatatatattttacaaatacatccagaggttatttgctatgtcttgctcaccagatgcaagttttgtgatattattgacataataagataatatattctgaaggatggtgatacagttgaggtgagcaagtgtactatgttatgacacaaaaagtgacacagtgcactattttatgaaacagaacagagacgacatattcctgaggtaatacaatacaaagaagatgtgctgcattccacacagtatgaaagcaaactttgtggtggtcctttctaatacatagatgcaagcaattgccaatcaatagtttttttttgttgtttgtttgtttgtttggatggagtctcaccctgtcacccagtctggagtgcagtggcacgacctcagcacactgcaacctccacctgccgggttcaagcaattctactgcctcagcctcctgagtagctgcaactacaggcgcacaccaccatgcctggtgaattttttgtatttttagtagagatggggtttcaccatgctggtcaggcaggtctcgaactcctgacatcgtcatccgcctgcctcggcctcccaaagtgctgggattacgggtgtgagccaccgcgtccagtccagaacaatatgtttataccaactacggagcttcatacaacctgctccaatatatacacaacatttgaaacaacagccgcaattggaggcaattgctaattaggtttacaatagttcctttcggtctatagcatcaatatttcttcacaagcccaagtggcatgttaagtgaaaataaagtagaactcacttttcttgtatctttgatggtggcataattccttgcgattgtactacaaatgacatatgacttttttttctgctattcatgtaaaatgagatcaaagacctctacttttttattgtaccataagagccttttcaccaggggccaaggaagcagtgtggggattctgctagctatggagtatgaatatttcaactatgcattcagatcttggggaggtaactacggaatggttttgtagatttactctgcccacttacagatggattcaggccaacattacttttctcaaatgacctccataagcccccactctgagtcatggacagcagtggccttttgaagtatgaaaaatttatgtcagctcagagccagtgtattgagtaatacttaaaaggtctggatattcaaagcaattaactttggaaaatgttcacaggtttctttggggaaagttggaaagactcgtttcattgcatatttgtaggtttgtttctagggtctaccttcagggggaacccagtttctacttcattccaggagctctagaatctcttttgaatcacatctgggaagtaggttagaggtccttgattctttaacttggccattccttcaagtatcttcagcccacttacattttgtcttagtctgattatggatctatagcaaaataccagagatagggtaatttataacgaacagaaatttatttctcatggttctggatgttagggaatccaagttcagagtgccagtgggattgatgttgggtgagggctgctccctgcttccaagatggaccttattgctacatcctccagctgggagaaacatggaagaagggatggaaaggcaaccttgagcccttttataggagtgctaatcctattcatgagaatggagccattatgatttaatcacaccctcaaggcacacctcttaatacctttatattgggtattaagttttaacatgaattttgaaggagatattatttttcaaactatagaaaatttgtttttagtctatgttttccctgtttcacttattaataaataatttacttgattccttctgtttcagtcagggttcactcagaggagcagaactagcgggacatttattatgggaaatggaaattgactaagcagtctttgcaaggatatttctatatctaatgctggaggccaaagtccacggacagacaggcagggagaaaagataacaagaagtctggaaccacaggaggacagactgaaagtcatgtttcttcttgttaccactgacattagtgatgagggcatcctcgaaaacagagtcctttgccatagaggtggcctaaggtgacaaagagtcctttgtcatagaagtagcatgtaatacatgtggcctaagattcagagaaaataaatgaaggtatagcaagaagagaattggagaactagctgctgctttatgctaatgaggtgagttaacagactatccatgcatatcctacaaaacggttgcttcctgcctttctggcacccttattagaagcatataaaaagggaattctgggaaatactcttcagcttagccaagtgtgcacataacaaagccatcacatctgttgttctcattcccaggaacacctcgaatactcacttcatcaagtctctgcagaccaaaacccatctctgctaaccatacccatcttaaagatacaggtaagaggtattagttgttggcctacgccactgcacaatcccattaccactacttaaattaagatgtaacacctgttatcgtggacctgacaaagacagccattatagggctatcctttccaagaatgttggtactgttctcatcgttgtaacttttcaagtcacttataaaaggactatcttttggattcttctcaattcactggtgaaggaaatattctccaagcttttcttggaaacatgattagcttgcataagtgaataatccatgctgaatttactgtagttacttcctcttcctaagcactttctttttttcccctgctttacatgccaattaagttctagtatttccattctatttaatgtaggccaacatagcatccagatttcagttattcatcaggtaaactattagagatactcattgttgctcaagctgtaacccatattaaaaattaaatcccatctaatgttataatattttttcctcataaaataacacacttagaatccttccccgcatgcatttccaggtttcagttgatacgaattgagaaaaatcaggcagatcttttggcttttattctatcccctttcagtttgtgatttatccttattcttttgagaatatgctggttatttaattctgggtcaggaagacatgagggatggtacctgtgagtcttaaaaacaatcagcctccccttgaaaggcatctgcctcaaacaagggatcaattcaacaagaagagctaactatcctaaatatacatgcacccaatgcaggagcacccagattcataaagcaagtccttagagatctacaaagagacttagactcccacagaataataatgggagacgttaacaccccactgtcaacattagacagaacaagaagacagaaagttaacaaggatatccaggaactgaattcagctctgcaccaagtggacctaatagacatctacagaactctccaccccaaatcaacagaatatacattcttctcagcaccacaccgtacctatttcaaaattgaccacatagttggaagtaaagctctcctcagcaaatgtaaaagaacagaaattataacaaactgtctctcagaccacagtgcaatcaaactagaactcaggattaagaaactcactcaaaacctcacaaatacatggaaactgaacaacctgctcctgagtgactcctgcgtacataatgaaatgaaggcagaagtaaagatgttctttgaaaccaacgagaacaaagacacagcataccagaatctctgggacacattcaaagcagtgtgtagagggaaatttgtagcactaaatgcccacaaaagaaagcaggaaatatccaaaattggcaccctaacatcacaattaaaagaactagaaaagcaagagcaaacacattcaaaagttagcagaaggcaagaaataactaaaatcagagcagaactgaaggaaatagagacaaaaaaaaaccttcaaaaaattaacgaatccaggagctgattttttgaaaggatcaacaaaattgatagaccgctagcaagactaataaagaagaaaagagagaagaatctaatagatgcaataaaaaatgataaaggatatcaccaccgatcccacagaaatacaaactaccatcagagaatactataaacacttctacgcaaataaactagacaatctagaagaaatggataaattcctcaacacatacaccctcccaagactaaaccaggaagaagttgaatctctgaatagaccaataacaggatctgaaattgaggcaataattaatagcttaccaaccaaaaaaagtccacgaccagatggattcacagccgaattctaccagaggtacaaggaggagctggtactactccttctgaaactattccaatcaatagaaaaagagggaatcctccctaactcattttatgaggccagcatcatcctgataccaaagcctggcagagacacaacaaaaaaagagaattttagaccaatatccctcatgaacattgatgcaaaaatcctcaataaaacactggcaaaccgaatccagcagcacatcaaaaagcttatccgccctgatcaagtgggcctcatccctgggatgcaaggctggttcaacatatgcaaatcaataaatgtaatccagcatataaacagaaccaaagacaaaaaccacatgattatctcaatagatgcagaaaaggcctttgacaaaattcaacagcccttcatgctaaaaactctcaataaattaggtattgatgggacgtatctcaaaataataagagctatttatgacaaaccaacagccaatatcatactgaatgggcaaaaactggaagcattccctttgaaaactggcacaagacagggatgccctctctcaccactcctattcaacatagtgttggaagttctggccagggcaatcagacaggagaaagaaataaagggtattcaattaggaaaagaggaagtcaaattgtctctgtttgcagatgacatgattgtatatttagaaaaccccactgtctcagcccaaatctccttaagctgataagcaacttcagcaaagtctcaggattctaaatatgtgcaaaaatcacaagcattcttatacaccaataacagacaaacggagagccaatcatgagtgaactcccattcacaattgcttcaaagagaataaaatacttaggaatccaacttacaagggatgtgaaggacctcttcaaggagaactacaaaccactgctcaacgaaataaaagaggatacaaacaaatggaagaacattccatgctcatggataggaagaatcgatatcatgaaaatggccatattgcccaaggtaatttatagattcaatgccatctccatcaagctaccaatgactttcttcacagaattggaaaaaactactttaaagttcatatggaaccaaaaaaagagcccacattgccaagtcaatcctgagccaaaagaacaaagctggaggcatcatgctacctgacttcaaactatactacaaggctatagtaaccaaaacagcatggtactggtaccaaaacagagatatggaccaatggaacagaacagagccttcagaaatagtaccacacatttacaactatctgatctttgacaaacctgaccaaaacaagaaatggggaaaggattccctatttaataaatggtgctgggaaaactgggtagccatatgtagaaagctgaaactggatcccttccttacaccttatacaaaaattaattcaagttggattaaagacttaaatagtagacctaaaaccataaaaaccatagaagaaaacctaggcaataccattcaggacataggcatgggcaaggacttcatgtctaaaacaccaaaagcaatgacaacaaaacccaaaattgacaaatgggatctaattaaacttctgcacagcaagagaaactaccatcagagtgaacaggcaacctacagaatgggagaaaatttttgcaatctacttatctgacaaagggctaatatccagaatctacaaagaactcaaacaaatttacaagaaaaaaacaaacaaccccatcaacaggtgggcgaaggatatgaacagacacttctgaaaagagacatttatgcagccaaaagacacatgaaaaaatactcatcatcactggccatcagagaaatgcaaatcaaaaccacaatgagatatcatctcacaccagttagaatggcgatcattaaaaagtcaggaaacaacagatgctggagaggatgtggaggaataggaacacttacactgttggtgggactgtaaactagttcaaccattgtggaagacagtgtggcaattcctcagggatctagaactagaaataccatttgacccagccatcccattactgggtatatacccaaaggaatataaatcatgctgctataaagacacatgcacacgtatgtttattgcagcactactcacagtagcaaagacttggaaccaacccaaatgtccatcaatgatagactggattaagaaaatgtggcacatatacaccatggaatactatgcagccataaaaaatgatgagttcatgtcctttgtagggacatggatgaagctggaaaccatcattctcagcaaactatcgcaaggccaaaaaaccaaacatcgcatgttctcactcataggtgggaattgaacaatgagaacacttggacagaggaaagggaacatcacacactggggcctgttgtggggtgaggggagaggggagggatagcattaggagatacacctaatgtagttgacgagttaatgggtgcagcacaccaacatggcacatgtatacatatgtaacaaacctgcatgttgtgcacatgtaccctagaacttaaagtataataaaaatatatatatatatacacataaaaagaaagaaaaatatagatccataagtagcaacatggaaagttgtccaagatatattgttagatgaaaaagctattcactgaaggatatatagaaaaaaagtgattctacttttataaaaagaaaaaccgtactatttaaaaaaaaacattttaaagcaaaggaatgttaatattcttagtcaggggaagagatttttcttcttaaaagcaaagtaaaagaagatggggggagtggggagtgtaagtaatcatctctataagaatacgtatgaattctctcattctatgttcagggtttttcacgttttcctaatatacattctcacgtaagaactccagagagtttcctcatttcatttgcttgatacatctttacttggaaagtaataatttggtctttttatatcaatcccatggctacagaagataaaatattcttttaagtcatcatgggagttcatagaatcatgtttcccctatgtaaaaaatacctccttctatcttttcctcccatggatgcctttgttctctcatgctctttccacaacaattttcaaaaatttttaatgaatttcaaagtgggatacacatttaatacaatgtaggagaaaatttgaaagaaaagtaatcagacaaatgataatatcagaaaatacaatgagacggggatggaggataccatgttttacttttttcatataagttgaatagcatatatatatacatatatatatatatatatatatatatttgaggtgtattaactatcattgtaacataataatgattgtaaaatgaccccaagatttccaacctttgttccacatgatttatataatttcctcatcttaagtgtactcagaacctttgagtttgatgcaataatactctcatgattatgccatattacgtgaaaaaggagattttgcagatgtactaaagtcactaattagttgaccttgaaaaataaaataggagattatatatgttggcctgacctacgtgagtcttttgtatataggtctagaagtcagagtgaaggaaattcaggttaaaagcgacaaagatattttctttctggccttgaaggaacaactgccatgttgtggagagagcagaaaacagcaggcaatctcccagccctgagaatggcctcctcttcccaacagccagcaggaaggctggaatctcagtcctacgaccaaaagaaactctattctaacaggccaaatcagtctggaagaagatcttaagcttcaggtaaggcaccttgctttcagaccattagcaaaaaatgtacccactttgtgcaaactactttcaagaaaagctggactaatttacattcccaacaacagtgtataagcattttttttatccacaattttgccagcatgttttatctttccaataatagccattctgactggtcagtgatgttgagtattttctcatatgtctgttggtcatttgtatatctttttaaaagggtctattaaagtcttttgacactatttaatggagttgtttttcacttgtcgagttgtttttcacttgtcaagttgtttaattttcttatacattctgaatattagacctttgtcagatgcatagtttgaaaatattttccccattctgtgggttgtctgtttactctgttgatagtttattttcctgtgtagaagctctttagtttaattaattctcatttgtcaatttttgtttttctacaattgcttttattttttttttattttttattttttttttttgagacagagtctcgctctgtcgcccaggctggagtgcagtagcacaatctcggctcactggaagctccacctcccaggttcatgccattctcctgcctcagcctccccagtagctgggactacaggcgcccgccaccacgcctggctaattttttgtatttttagtacagacagggtttcaccgtgttagctgggatggtctccatctcctgacctcctgatccacccgcctcggcctcccaaagtgctgggattacaggcttgagccactgagcccggcctctgcaattgcttttgaggatttagtcataagttatttgccaaggtcaatgaccagaaatatatttcctcagttttcttctggaatttgtatagtatggggtcttaaatttaaatatttaatccagattgagttaatttttggatatggtgaaaggtagggttcacttttattctgcctatggctagccagttatcctagcaccactaattaaatagggagtcttcttaccactgtttatttttattggctttgtcaaggatcagatggttgtatgtatgttactttatttccaggttctctaacctgttccattggtctacatgtcttttttgtaccaataccatgccattttgatttctgtggccttacagtatagtttgaaggcaggtaatatgatgtctccagctttggtctttttttttttttttttttttttttgaggcagagtctcactctgtctcccaggctggagtgcaatggcgccagcttttttcttttaacttatgaccgctttgataatctgggctcttttttagttccacgtgaattttagaattttttttgaattttatgaaagaggatgtaggtagtttgatagacataggattgaatttgtagactgttttgggcagtatagccagtttaataatattaattctttccatccatgagtataagatgtttttctgtttgtgttatctcttatttctttcagcagtgttttgttgtgctccttgcagagatcttccacctccttggttagatgtattccttaatatgttattttattgtattgtaactactgtaaataggatttagttcttgatatggctctcagcttaaatgttattagtgtatagcaatgttaatcattttttacattgatttttatatcctgaaactttacttaagtcattttttcaagtctaggaggcttttggtgaagtcttaagggttttctaggtatagaaccatatcatcagcaaaggaagagagtggaacttcttttctgccaggtgcggtggctcacacttataatcccaacactttgggaggctgaggcgggcaaatcacctgaggtcaggagttcaagactagcttggccaacatggtgaaaccccgtctctactaaaaatacaaaaattagccgggtgtggtggcggggagacctgtaatcccagctacttggaaggctgaggcaggagaattgcttgaactgggaggcggaggttgcagtgagtctaggtcgtgccaatgcatgccagcctgagacacagagtgagatctcctctcaaaaaaaaaaaaaaaaaaaaaaaggagagacagagagagaatgggacttcttttccgatttacatgtcttttatttctttctgttgcctgattgttctgggtaggtctttcactcctatattatataggagtgatgagagtaggcatccttatctttttcctgttttaaagggaatgcttccagcttttgcctgttcagtatgatgttggctgtgggtttgttatagatggtgctaattattttgaggtatattcctttgatgcatagtttgttgagggtttttaacatgaaaggataatggactttatgaaaacctttctctacatttgcagaaataatcttatggttttgttataaattctgcttatgcgaagatcacattcattgatttgcatatattgaaccaaacttgcatcccaggaataagccctacttgattgtggtgtattacctttttgatgtgctgctggattcggtttgctacaattttgttgaggattttcaaatctatgttcggcagggacattggcctgtagtttcatttttcttgtgtctttgccagttgttgatatcagggtaatgctggttttgttgagtaagttaagtaagggttgatcttcctcaaattcttggagtacttttagtataattagtaccagctctcctctgtgtgtctggtctaattcgggtgtgaatccactcatacaggatttttttttttggttggtagtctttcttgactgactcaattgtggaattctattgttctgttcaggacttcaatttcttcttgattcaatatttggagattggtttttctataaatttattcatttcctccatagtttctagtttgtgtgtctagaggtgttcataatagtctgagaatcttttgtatttctgtgtgatcagttgtaatatcacctttgtcatttctgattgtgcttattagattctctcttttggttaatctagctagcagtttatcattgttgtttatcctttaaaaaatcaacttttaatttgcttatcctttgtaagagtttttgggtctcattttagttcagttttgctatcttatttatttctattgtcctggtagctttggggttattttggttttgtttttctagttcctttaggtgtgatgttagattgctaatttgagatctttctaaatttttgacaaatgcatttacagctataaattatcctgttaacattttgctacatcccagagattttggtatatttctgtatctgttttcatttgtttccattttttaaaaatttctaccctgattttgttatttacccagaagtcattcaggattagtttgttaaatttccaactaattgtgtggttttaagagatcttcttagaattcatttctatttttattctactgtcatttgagagtatggttgccatgatttcaattttaaaatttcattaagattttatgtccaagaatgtggtcaatcttataatatgtactctatgcagattagaagaatgtgtattcttggttgtgtatatatgtgtatatatggttgatgggtggaatattctatagatgtctattaggtcgaattggtcaaatattgaatttaagttcaaaatttatgttggttttctctcttggtgattcctctaatgctgtcagtggagtattgaagtccctcactattcttgtgtggctaagtattttcataggtccagaagtacttgttttataaatccaggggctctaatgttgggtacatatatatttaggacccctaagacttcaatctttctccacccctttactttgagcctataaatgttgttacatatgggatgggtctcttgatgacaacagacagttcggtcctttattaaatccagcttgtcactctgttccttttaagtgtggcaataagtctgtctacctccaaagttaatattggatatgtgcagccaggcacagtggctcacgcctggaatcccagcactttggtatgctaaggtgggtggatcacctgaggtcaggagtcggagaccagcctggtcatcatggcaaaaccccatgtctctactaacaatacaaaaaattagccaggtgttggggcagatgcctgtaatcccagcagcttggtagactgaggcaggagaatcacttgaacctgtgggatggagtttgcagtgagccaagatcacgccattgcactccagtctgggcaacaagagcaaaactccatctcagaaaaaaaaaaattgatatgtgaggttttgatcaccttatgggtttcttagcacgttgcttttcagtttccattgtgtagttgctttatagagtttgtggattatgtacttatatgtggggagatttttttggtagcgggtattgttcttttgtttccacatttataactcccttgaagatgacttataaggttggtttaatggtaaaaaaaaatccttttgcaattgtttgttggaaaagattttattccttttttacttgtgaagcttagtttgacagcttcattcttggttggaatttcttattctttttcctttttttttttttaagaatgctgaaactaggcccccatctcttctggtttctcctaagaagtctacttttagcctgatggggtttccttggtatatgacctgaccttattctctaactttaagattttttctttagcactgaccttggaaagtctcagtgactatatgtctcggtgttgtttattttgtatattatctcactgatgttctctgcatttgttatatctgaatctctatctctctagcaagattagagaaatttttttatttatccctcaaataaaatgtgtttttcatgttgtttacttttcctcctttctcaggaatgccagtaatatacagtttttttgtttgtttgtttgcatgatcccatatttctcaaacaccttgtccctttctttaattatttttaaaatttttatctaaccaaattacttccaaagaccagtcttcaagcactgaaatcatttcttctgcttagtcttgtatattgatacagctttcaattgaattttgaaatatcttaagtgagtttttcaattccagaagctctgattgatttatttccagatatttagctcttccttaatttcctggattgctttagcagttcctttctgttgatttttaacattttcctgaatcttattgagcttctttgctttgaattctttgtctaccatgtctgaatttctgttttggtataggaccattgtaggagagctagtatgatcccatggtggtgtcacagcattcagattttacatggtgctggtctcttcccatctggagatgctggcacttctaggttttgtaattgtttttatggatatgtcatttttcttctttttttctttccctatcttattattatttttctacctctacctctttcctagaggatatgactgcacagaatgtcggatgggatcttttggctttgcttctatatctctatgcacttatgttggctggttttatattgggctgtatggttcaaactacagactaccagattgagccgatgggtaagagtcaactgtggccaatgcaaatgggtaaacatatagtcattgtttactgggagaaagtctcgttgctgcaggcaatgagctaatccatggaatgcacagtggtctgagttccctgcttatccctgtaaggtggggacccatatgggcaaggccagactggccatgcccacctacagatgggccccatcggatcacaatctctgcacaggagggatgggcaacttaggctgctggttcaggtgtacaagtgttctgaatgcctggagctctatctgagtgttgagtggggaggacctcactgcaccacaatctatggaaaggaggattaaggtggaaaggaggggtaagcctgggcatggagcagaaaaggccccactgcatctggttcttagagaagcaggctgtgacacacaggaatgtcacacacaggctagttcctccctgtgtgagggagtgttttgactgcctgaagatctgcctgggcatggagcagggagggccacgccagtcccccatctatgtgcaggaatggtggggtggctcaggctgctgatcctggagagcaagtgctctgaatgcctgaatatctgcctaggtgcagaagagagagggtcctgctgcaccctagtttatgcaccagaagagtgggacagcttaagcttttaattcatgtgaaaaggcactcttagtgtctggacatatgcctgggcatggagcagagagggccccactgaaccaggttcttcgagaggcaggctgagacagccaggaatgtcacacacagactagttccaggttgcccagttggccttagctacaaatctcaacacccaggagaaactatggcagcaatggctctcctgttccacatgtgatgagagagagcaccatttcagtgcgtacacctggagcactttccacacttgtcacttaattctggttgtggaagctactagccagctctgtagcaagtgctgtaattcctggactaatactaaaacacttgcacagacacactgctgggctgccaaagaaagactgactgtgtacaagcccacatcaaacctggcatcctgctgtctgcacaggactgggaaaatgcctgcaggtattcacagtgtctttctcttgagtctccaagcctttccccaaattagctccaaaaccgagaaaaagaaaagtataaactgtactcccttggcctgtgttgcatgaatccctagtggaaaagtgagtcacagagagagattagtttttctactttttttcatgtaggcacttagagctatatattgatgctttcttcttagtgctgcttttgctgtatcctgttaattttagtaagttgtgtatccattttcatttgtttcaggaaattttgtatgtccttcttaattttttcatcgaccatcatccttcttcattttttcactggtcttccaggagcatattgtttaatttccatgtttttgtatagtttccaaagttcttatttatttttagctttattttattgtaggtagaggagatacctgatgtgatttcattttttttctttttttttttttttttacttttttaagacttattttttgggctaatatatggtatctccagaagaataatgcatgtgctgaggaaaataatgtaggcattgaatgaaatgctctgtaaatatctattaggtccatttgctccataatgcagattcagttggatgtttctttgttgattttctgtctggaagacctgtccaatgttgaaagtggggcatcaaagtctctagctagtagtgtagccttgaatttgtatgacatgactggctgactatattagtctgctcttgcattactataaaaatacctgatactgggttatttataaagaaaagatgtttaattggctcatgattccaaaggctctacaggaagcatgatgctggcatttggtccatcttttgaaaggcctcagaaaactttcaatcatggcaaaatgtgaaggggaagcaggcatgtcacccatggccagagcaggaggaagagagatggggcatgtgctacacacttttaaacaaccagatcttgtgagacctcacacactatacagtatcaacgtcgggggatggtggtaaatcattcatgaagaatccactcccatgactcaatcacttctcaccagccccatctccaacattggtgattgcattagttcattcttacacggctataaagacatacctgagactgggtgatttataaaaaaaaaagaggtttaatcaactctcttttctgtggattgtacagtcttctgcttctggggaggccttaggaaagttataatcatggtggaaggcaaagaggaagcagacacatcttcacatggctagcaagagacagagaaagagtgaagggggaggtgctagatactttcaaacaaccagatcgctggataattctaacatgagacagcactaggggtgataagttactgcagaactgaatctttccctttcaagatagcaaatttccttcttggcctaggctatgtctaaaaatgtcatttggaaggtagggactagaatgaggacctcaggactctgcatggtgccctgtccttctgtggctgagctggtgtttgagtttcaagacaaagtcctctttactctctcttctctcctcaagcaacaggaaggagaatgtcccagaactgtgagctctgctgccagggggtggtggaggggtgacacaagcactccctaagctgcccttacttgtatctcagtaggtcacaggcaccccaagtctactggctccaagccaccacagcaccagaacttttccgataattgcactccttgtgccctagatcgcctttcatatttgtttatttatttatttgcgatgaagtttcgctctgtcgccaggctggagtgcagtggtccgatctccgctcactgcaacctccgcttccccagttcaagtgattctcctgcctcagcctcctgggtagctgggactacaggcatgcaccaccacgcctggctaatttttgtatttttagtagagatggggtttcaccatgtcggccaggatgttctagatctcttgaccacgtgatccgcccaccttgacctcccaaactgctgggattacaggcgtgagcccctgcgcccggccgccttttatatttatttaggatccagtgtgctttagcacatggtgttggggcttgccagaactgaggtttcaaccacttagatggacaatttgcctctggctagtgctggtttaaatgctgcctctgtgggctctgactgaattcggtccagtgttgctttccagtatgtcaggcagctgtgagtttcaatgcaaagtcccacaatcactgcactctttctcccctagctcacagattctctgcctgtgtcgtatggctattgccaggggatgaacgagggttgctcttcgcaattcaagactgtctttcctaccctcttcagtgcctcttgatgttaaaaccaggtactgttatcgctcatttgatttttggttcttatgaaggtggcgttctgtgtgaatagttgtttagtttcgtgttcctgtagggggagggatggtctttagagggagtctacttagccatcttgctctgcctcctctccagaatctctttcttaatcaaatgcagtaacttcctacattcctctgctgtatccagtcttatctcccatgaatctgtttataccgtagcagagaaagtgatctaccttttaaaaaacctgaccatgttgctgtcaccaaaacattctattgttttttagctcctcctcatgtacaaattctcaaacttcttaacaattttctttcataactttgtacttactgatctatgtcaacttttttttaatcctagctttgcactttatatttaaccacgcagaactcttgtgagactgagcccttagcctatgaaatctgtcgctatctctggatagatacttgtgttgcttcaccaatactgtgatgtttcttgtcataattatttactctgttcttttcttcctgaaatgtcctacagttttctttaatcaacttctctttatcttttctgtatcatatctagtaccacttcacaatccacatttctggttctctctctaataacatcccaagaatttctctaacactgaactttgcttcataatagttatctatgtgactataattcttgaagaaagagactgcctcatctctgattctacattgctttatgcagtttgtgttaatggtataaagataacaaatatttattaactaaatgagtacagtgtaagctgttaaattacttgagaaacaaagttgctgataatctttatgatccttattttcttttaattattttttcaagttttgtctcttaatgcagagctaatgaatacatggaaattcaactcaaatcaaattcagatttgagataatcaacagtatgttctattgccaattttgcccaaatggtatattattcagtttctcataaattggcaccaaacttacttgttacttcacttccaaaaaataatcttaaacatcatatcaggtaactgtggtttgcttatccttcatattcaataattggtcatgatttcttttacctcctaagagattaaacatctaaatcttctctgcaatgttgtatatttctatagttcatttccaaataatcaaatatcatcctatttcttcagtatctgtcaaaatgtcatctctgcttttagatttactaactcaaattcatcatccacgtgatttttattcttatctctttaaatgaaatttaatgctgtatgatttttcctttattgagcttggtgtccagagatctataggactctggtgagagagtgttggaagtgaagattgaaggttgactttttcagaagggcctcaatgagtctggattcaaaacaagaagtgagctacttcttcattgataggatggttggaagtaaaacaatatctgagagcagaaagccctcttctatttttctagctcagtagcggtgagagtctttcatctgtagcctcccagggaaggagtcccatgtacctctaagatcctgagggttctggctatgaaacatatgtaaacattaaaatcaaagtctagattcattgacataatgaaattgcagcttttctgataggcctcaggaagaagagagagaaaaataagatggaaaatttgaagcacatggcaagggaaaaaagctgctgaaagagacagatggacacctgatttgttttaagcatttaggaagatgcactcagaaattagattagatgagagaaaattaagaccaactttaatgacttaacaggtttaggaaaatttggaggaaaagaataggagcttcaaagggggcaaaggggacagatggaggatcagaaataacaaaacaattgattgaagaaaatttgaactaaatgaagaactgtgttttcatattgagaatactcactgggtcagtcctaggctgcactaatgagaaaaaatttctaactgggcaaagcctgatagaattaatgataaagaaaaaaattttaactgtatatgtaagcataagtcatcagtaaataaatatatttgcattaccagtggttataaaatatcacttactcaagatattatttgcatctcagatgcagaaaggtatttgaagatatgcaataattcaaaagcgtattacgtaagtatcccatctatgtaatatctattatctatctatctatctatctatctatctatctatctatctatctatctatctctgcccccacttcctggcacagatggcacagaacttcaaaaactcttgtagtttcctcagtgttatgcgttttaatctttggttttaatatttgttctctgtaccagttcctgacacagagctcctacatcccttggaatttcctgggtgataagggcatcttttgctcaaatgagatgacccttggtgggctcctgaatggagattagtcaccaaaagactaacccatgataataagctcagagctttcagccacacttcccattgtttagagcagggagagggactagaaatggagttaacaatcaatcctaccttcatgacaaagcctctacagaaatccctgaactttgggggttaggagagcttcagggtgaatgaccacattcatgtgccagaaaagtggcatgctccaactccatagaaacagaagctcctccacttggaaccctttcagacttcaccctatgtattccttcatctggcggttcatccatatcttttattatctcctttattaataaaccagtaaacataaagaagtgttttcctgagttctgggagatgctctagcaaattatcccccaaaagggattatgggaaccctgatttatagccaattaggtagaagcacaagtcacaacctatgacttgtgattaacatctgtagtagggggcactcctgtgggactgagcccttagcctataagatctgtcactatctctggatcgatcgtgtcagaatggaatttaattaaagggcatccagctggtgctggggaattactaggtcagtgttggggggcaactcaccacatcttggtgactagaggtgaatgaaatattctgtgttgattgtgtaagagtagagaaaatactttggtttttcctatctctattattacctaagcaaataaaaaggaatagcaccaaaccaaaactgagacctcaaaatgtggcaatgaagagaagatggaataatagtataaatatttatataaataaattgatagatagatgtagctatagatgtagacaaataaattttgtgtctgtattatatacatattgtagaataaattattagtggttaagtgcatactttctggtctgatttgagtattacataagattcacagaaagcacacgttgtcaggataatgctaataaaaactacactatttcagccaagattcaaggtaggcaaaattcaagaaaattttgtatattgatacctgaataacttaaagaaggtagattgtttgtaactcaaaggataaatgattgagggaatcgatactccattctccatgatgtgtttatttcacattgtgtccctgtatcaaaacatctcatctaccctataaatatctacacctactatgtacccacattttcaaaagtatattaaagttttagatgaaacagctgaatttatagtttgatatgctccatttatggcaattttaacattctcttcaataaatgaatgtatttcagttaaagaaagaattaattctacattaaagccgataggaagtagagattcaagtaaaatatttcagatactgagtaaataaaaaacagatacatactataaaatatgtgaacctagaaaagtcagacgagcaaaaaattgagagttataggaatacaatagcttattttaataaattataacacacaatgataagatcacccactttatagttacaaagtcagaaactagtacacctgtatggaaatggaatatagaaatgttgatcttaataggtggcttaaaaaatacatcagcataggaattattattcctattctattagcgtaagaattagtacttgagttatcaaaaatatgttggaggcacttattggcattgttgaatccaatatgattccgccctggaatactgggtggaaaatttgtacatttttgaaaaagatatgtaattaaagatttgcagcagaaaatgtcattaaaatttttaagctaaaaaatacaggaaggaaaaaataaggaaggtaaaaaaaaggaaggaaagaaaaagaataagaaagcaaggactcaattgaccgatcaacaagactctcttgttggattaaagtcttaacaccctataatgtaatattcaaaaaacaagtttttttcaattaaaaagaaataacaagcatcttcaaaacaatgacatgtggagtaggaaaaaataataaaaagcaacattgaagattataaatcaacaaaaagggtaaagagaaacatcatatattaataaaatgtagcaggcataaaaatgttgtgttcctaattatatttgtgtgaaatataataacagataaatacattgaaaaaagtagaaatagagaaagatttcaatatgacttaacacttgtatcttacaagaaaataatggcaaatatttattgagtaaagcaatcaatacacatgatttaataaataatagtttcatagaacaataaatctatatgcaccagttgtaagcatatatatgttttcatatgtccatataacatttgtattcttcagctgtcattcctccactcaaagcaacatttttaaaacagattgaagatggattactagtttataagattacattagacaaaaagtgttttatgtttaaattagcttcaagagtatttgtacacattttatatcctctcctggaattgccctatatatatgtgtgtgtaaatatataaaatatgattttatacattcaacatatatatttaatgtatattttgtgcatatatattgaatgtgtatatatatatagtgtgtgtgtatatatataaaaattactttcttttctattttcataatggttaagacatctagtttcttatctcaggctacttagtctctctccttatactcatcctctttcccagaattttttagctcttctaactactactcgtgagttttgagatctaaaagctagtgagtatggatcaatgaaaatctgttatctattccagaaaatcagttataaatcatgccaataaaaacagattaacaatgcaaattttatctactgtacagaaaacattcctgtagctttacatttaaatgtgtatatagtaaattttaccatatttctaagaaaatacaccgttacaaccaactgaggtatccagcaccatattcaacagatatttttcttttcttttttttttctttgaaacagagcctccctctggtgcccaggctggagtgcaatggtgtgatcttggctcactacaacctccacctcctgggttcaagcaattctcatgtctcagcctcccaagtagctgagattacaggcgtgagccactgcatccagccctaacttctttaatctcagggctgtaaagaatgaaaatatctgcccataggttggaggttgcattttggttagctatacctctcaggagacccacagaatcaccacctgctttagtgaatacttgatatttatcccccacaatgaccattatgacctttagactatgatactgaccaactcaatgattcatgccttgcccccaaaatgtgaagatctacaatttaaatagtgatctctagattttctatttagggcttctacccacaatattcgacctctgataggaaactattcacatcctgaatactgccatttgatgacacaagaaatggctcagtaaaaaaatcacacagagatgcagagacttttgaaaggaaatcttagaattccccaaaaatttccaactcatgaaacaacagatttgcaattatttttaccattgcttctaccatataatggaaactcttttgggtataaagaaccagcccaaaatgcagtcttttgaaatatgttaaaatttcccaatcaaccagaagattttagaatagtgaataatgctatattttcagtgcttactgaaaccgtacttaaatttgcataaaatacatctgagtcaaacattcacacagactattttttattcattgactatatatgaaatccaatatcactagtataaccatctcaaaaaagatacgtgtggtatctaagtttatcaaatacgacagaatttatttagtctcttctctttctggaatgaaaaaaattcatcttatcatttacaagactcagcttctgaagtgttcgtatataaggtcccattttctataatatcttgattttcctaaataatacaaatttctatataacggttactgccaataggctgtttcctaaaatgttatttctgtacatatttgggagaaatgtcgaatattaataacacaatatataattaattgtatttataaagcaataaactccttttgatgttccaattctttacaattttagctttcaaatctttcatcctgaccctaagacaatcattaggtaactaatgtcaagctgaatttcattcaggtctgttttccatactcaatgaagaaataaatgatgttacaataagctcaaattcatttattccttctataataataacctagtgtgtattctacactttgtaaaacaaaattatataaaaatgaatgaatagataaataggtaaatactatgagccctgccagtgacaattttaaacaagtttagaggtagtacatttacatcactaaaaaatattttaagaacttatccaacatctatttagacacccaaagtgaatattttattaagacttttttctcctaaaaacaaaagagagatttcttaggatagccatcgcaggtcatacatcttaattagaagttcctggatgggctgtgactgtgtgtatatgtttgtgcactaaggcaggtcatgaagccatgtgtgtatgccagtatccccttctctggggtgagagttctagtttaattgggacagggccttttttatcacctaataccttagcacaactattttcagcaccctcttcactttcgtaagagttgtgagttggaagataaattatagaatcatcctacaaggagagaacaaaataaaggttaagagcattgatgaagtgagcagggtagaatttctagagaaatcagtggtgcaacaactgtcatatattaaagccaaggagccatcagacgaaataccgttatattccacactattaagaatgacaaaatgctgtcaattaatttctgatacattatccattttaataaagcaacctggtttcagagacattcagtagtgaaaagaatgtgggtcttatagtgaaatacaatgtataaatttagcttagaatgaattacaatttaagtaattagagtgaatatattcttgaaatgattgaaaatgtatatcttaagagaagcatatatcaaattaactcttcaataagtattagtgtcctccttttacatctgaaatatgagattacatataaaagtggccacaaacgtacaatttgtaaatttataataaaacctatttattatgtttaaatctcaatgcattgagacattacacaaatatttgtgttttatgttttttgttctacctctgaatcactgtctgttttctggactctatcaatttaaagttaacagtgggatttctttggataattaaaggggaatatctctgtcacgctagcccatacgtctcacagagtggtgccctctgaatgcaacatttcattctgtctctcctttactcatcatgaggtcaaaggattgttcttcagtgcactaagtgcagtcaaatagccttacaagtaaacatcctttacaagtcgagcctctagacagaccataacttttctactttgttgaactcacctgacagggcaagaaaaattgctctgaagagctgtagccaggagcactttacattcacggccagacttccacttcacttcccagaagcaatcagacttcttcaatcagataccttctccttctagggtcttttttattctgaactgtaagaacagagtgaaatagatattttgtgaacagacacgtgttgataagaaatagattactaatgacattaagaattattgcaaagtaaatcacagtaactaaatgatacttgaacttatctgaaagataatataggcttaaataaaatcaactaaaaacaatgagactgcctttttgtctacatcagtttttatattctaaaagtataaaataatttttatttttaatttgggaagtcactcttcttttaaaatttattctaactataattttccaattataaaaacatgatcctcatacaatatagaataaatacatgtcaaagatttattgaactccttaactaatgagaggaccagttaaatgggaagactgattccaagaacatttgaggaacaagtgttttcatagtctattaggaaaggcatttatgtggaatattagaataagatcactagattaaatgtaacacaggttcatattccaagtggtaataaaaccataatctttggggatacctttcttactaggcagatatctacaagtagacatgtaacttcccagtgactaggcaccaatcaattggtatacaaagtaaaaaaaaaatcaattcttctagaaaattaaataatccttgggttattactgtcatagggcctgttgatagtgcagtggcactgaaaggacttaaatatatcctcttgcattatttcctatattttgatcatattttttcttacagttcctactacttgtaggtgatcacctgaatgccattcaaaaattatactttgccttaatggcggaggtgttaagatgtttgaagatggtttgtaaaggaagagcattcccttaatgaaattttaatatgtttgccaaaatcttaaaaaaattatgggttgcatctgccaattattttcaaatttctagaacaccgagttttatttatttcagatgatacaatttacatctcaaaaggaacaaaatacctctcaagtaattataagattattttgtctaatcttgaaaatgtcttaatacactggaaaaggggactgaatacttcactgactaggactgattggccatcttagtggattatgaaatacatgagaatttataatttgaatttcatgttttaaacttcaacagtgtactaatcaataaaacatattctaatgagatgaaaagtgttttttatacattatgtttctcttgtagtagttatatctttacaaaatttacttttttataatatgttataattataataatatataatatataacatcatgaaaatatatatgggcaataaaatcctggtaattgctttctttgtattcctacaaaaattgtattctaattaatggatttttttctagtaaagtattatgacaacaactttgtattaaataataatgctgccacatttatttacaaagtagagaggtactaagtttaaaaaagtatgtaagcataatatattattaacttattaaaattatatccccacataaaaatattttttgatatagtatgttttccagtatcatttttaaacattattattagccatgattacttccatggaagttattttgttttgcaaatcctataatagtgcactaatttatgtgtgtgtgcgtttagtatttgataattctagaagaaacaactgaaaataagatttaaaaatgttatactaataaatagagtgattctatataatctcttaatctctttttcacttttttactttttttttttttttttgagacagaggcttgttctgttgccctggctggagtgcagtggtgcaatcttggctcactgtaacctccgtctcccgagttcaagcgattttactgtctcagcctcccgagtagctgggactacaggtgcgtgccaccatgcctggctaatttttgtaattttggtagagacggggtttcaccatgttggccaggctggtctcaaactcctgacctcaattgatctgcccacctcggcctcctaaagtgctgggattacaggtatgagccaccatgccaggctctttacttttatttatttttttactttttttaatgtttgcttccatatactttcacatagagaataaaagaaataagtaattaacttaaggcatctcacaaaaagggaaatgttaaactcaacatctgattttgttttactcaagctggcaagtaggatcaaacaaatgccacatttaagtctttaacatacattgaactatattttctaatttcactgcttttgagaattagtgatttgcattaactaaaattgctaggatacagtttaataaacaatagtaacaatttacttgaatgggcaaaagtcatttcaggttagaatatcaaaacaatatcattttgttttacgcaattgttgttgctttgaaggccaacataagttacatacattttggagtatgtaacaagtttctagaaaaaataatctatcttttcttccaaaggctatccttgattttctttaaatcaaatgaggttataaaatatttctctgtaactttattttttatgtaagaattacacattaaaataatatttcatgttaaaatatctctttgagctgttttttcaacaataatatcaataagttaataaccataataatactaatgacaagagtacatattctatgacagtgatggagctacatgtgttttatagattgttccttggctcacaataatctcttaaggcaggtaccagtggccacattttcagagaacagaacagaatattgtaggtggggagagttaaatcatttgccaaagtacccagttgggtaagcagtttatccaaaaacaaaacctatgtttgtctaactctaaaacctatgattcttttactcaatcgtaaatacaaattataagtctagactcctaatgtacttttttatgactctagtatatgctatatccgggtaacctaacctctttaatggacaattcagtctcgtatgagtgatatttccatttatagttggactaaaggtgaactatcttataatttgcccttggtaggaactttcaaaaatattgtttaatcaagtttacatcactgtctgggaaactctttaactcattcatgacaagcataagaatttgggagttgaggcagagttatcacagtttgtcatttacgtgagttttgagtactctttcattgttttcctctaaaagtagcctcagattgaagtttcctggtttaataagaaaaatgataaaaataataacaactaacttgacttgtcttagtatcagatctttccaaattatattacatgtatgcaaattaagagagtatgatcctagggctgggcacggtggctcacgcctgtaatcccagcactttgggaggccaaggcaggtggatcacaaggtcaggagatcgagacaatcctggctaacatggtgaaaccccgtctctaccaaaaatacaaaaaattagccgagtgtggtggcgggcgcctgtagtcccggtgtgaacccgggaggtggagcttgcagtgagccgagattgtgccactgcactccagcctgggcgacagagcaagactccatctcaaaataaataaataaataaataaataaataaataaataaataaatataaaaaaagagcatatgatcctttcttcttttcattctcaggaaaatagaacataaacacaagtgatttttaaataaaatattatgcagggcagagagagatttttccacattaaaaaaacaaaaacaaaaaaaacgctcgcatgtaggccaaaatgcacttgcaggtttataaatttccaatatgcacaacttcttacaagccaaatgataaattgccccaaagataagggaattatttgaaccctccttgtcaaaatatggctgagttagtgttttgaatcatgatttacactgaagatgtgaggtgaccctgcggtatatatttcatgctctaattactcctgcctctgccttgtcagttaatatgatgttgaacttaaaagggcctcttcacaataaacctataatgaagcctggaatgatggaagtgagatttgtaatgtaactttgaaaagtttgacagtaaaatgaatgtgatgttctctctaaaaaagagaagtcaactaaaagtgaattcaaaaaaaaagtggagaagaaaaatatgcaaaagaaatggatttcaatttaagtttatagtgccttgtagaatgactggtacaatcagattttaataaatgtttgagtaatggacaaataaagtcagcacaataattaataggactgatcttttctctgagggaaatttacacaacttagagggataagcatgcaaacttacaattgccaagctctggatttcttctccaataagattcctacgctactcatcactttttcaatacttttgaagacattcttgaccaaaggtacaggataagcttaggaggttacaaaagtttcaaacaccaaagcacatctgctttatgatcatccataaaaatataagctgactcgtgacctgctacttgtgacttgccttctccaattgagtgtgttagtagtgatggattcacttctaagactttaggaggttgtttgcacatctttcccttgcttctctatgagctgctgaaaccacgtctaggttagcctgttgaagagaggtgagagaccaattatagagaagctgagccatccaaaagcagctgacagccagtctatccacattacgtgacacagcagggccatttccttaacccagagattactgcaaatataacactgtcagccaggacccaaagaaccgtccaactgaactgcagatttgtgaattgtaatcagtagtattgcttctcttagtttgggcttccaagaagcaaagcctaagacttgttttcctgatcgagtaagtattgagggaattctgtcacataaagagaagtaaaggaagctgaatagggctaagcagaggtgtccctcagctggggactacaggcattctgatccaaaggggaagctaaaacacaaatagcaccacaaagtgaatcctgcagtgaggaaagggagtggctatttcctgccctagtgtaagtcagttattggcagacagctttcctccaagggaaatgagattgggaaaagggtatggggagtagtagcctttagggctgttatagaaggcccacccacttttggctaatcaccatagaaaaggcagctgtgaatgatgagctaaaatgcacagcagctggagattgggcaaatctaccaccaaaggaaattatgttgaggcaccagcagcattcactacattgttttaagcaactaagttaagcagggataactaatataataaccacaatagtttcatcattgtctagtcattgctgaagtgaaaaatgtacatatttaaccattttatgatcgcttaatataagaggaaggagtttagattgtttttactatagatatcaggaaactaagagaaacccattttgcagaggaatatgataagaccacattattttctggagggacccctttagtgactgacatttaaatagatccattggactggaaagatttaaataacagagagatcaatgagaaggatatagcaatagttgaattagtgattcagagaccttgaattagtctgcattaagtagatctctaagaaaaaataataaagacatggtatcttactattctcagattgctataacaaaaaatcatggctggtggcttaaacaaacttatttctcatcgttctacggggtgggaagtccaatatcaaggtgctggctgatttggctcttggtgagggctctcttcctggctagcagatggcctccttctcactgtgctttcacgtggtggagagagagcaatatgttgctcttcttcttacaaggaccctaatcccattatgagagtcccaccctcattatctcacgtatgctaaattccctcctaaaattatctccaaatatagtcacatagggggttacagcttcaacatatgatttttttaaggaaagcacaattcagtccatagaccatggtaaacaatttgatacaaaaggcttggaagcagaaagtagtgaaaagaaatcagagtttacattttctgattccttctagatatcaatatattaataattaggacgactgaagagagagttaatttgagggagaaaattatgaagacagatttggaactgctgaatttggatgctttagaatattcaggcagcactaaattacaggcatttgaaatacggttgttaagcttggatgatttagaaataattaatatcttagagctttaaaatggaaacttttcactttagggtgaccatttggaagtggcaggtaccaaggatagagttctgaaatcttaggatcatgcagaacaggaaaaggcaataaataatactcttcattagtgaaaagtattttatacgtgctaaattctatgtaaatatttcaagctgactttttttaatcctcccaaaaacctattaggtaaggtctaatatttccaaattaaatgtgaaaaaatgattgtaatcgttatttattagtccaaattttcagagttattaattgaataagccatgatttgaacacaagccatttcaccccaaagcctaccttattaatctagaaaaaatctttaaggtatttttcttttgttaacagatgtgttatctacaatgttattctttatatctgttcattgtctcaccaaatacatgaattcataaatattcaccgtgatgtttgatctttttacaacctggcaaatgggcaattgagtgttttctttgtaaattatctttgcaataaataatttattaggatgtttttacttactgtactggtaagaattactaaattgaaaattaataaaatatgtacaacttaaacagtacataagatattgattttaaggcattaattgatgggtttatattaaatagcttatagactgatacaacctctttaagtactcatacatttagccttaagactaattaaataaattagaatttttcaagttaaagaatttttatttctttcagagtaaatggactaacaaaaacttccatggggatcttttctgaattatcaaaagagaataaggctcactggtaaaagaaatataaaagtatatatttcatattttaaaccaaaatataaaagtctaatcctctacatttatttctaaatataaactattacatttcaagctattatctttattacacataatttaatagatgagaattacataaattcctattactaatgaatataattattatgcttttttcattgtatttgactatttagtttgttcatgtatattttatttcactaatatattttttcattttttttgttatcatctacagagggcaatatatagctttgctattcaaaaagtatattaaatctagatgtaagcttccatgcttcctataagcatggcttaacaagtatctcgttaactgtacaatatcaaaaagtgtcaaaagacaagacctttttgttggacttttgcttatcttttcagttacaaatatttctgaatgtgctttttctcattctcatgtatataagacaacctgaattgctttagctacgccatgtgtagttaaacatttttttaagaaaaatacagatatctcctaaaagaataacaatgtatcgtgagctataaaaataatgtggatggtgtgtgtgaatagtttttaaagtagtaattctgactgtggaagttactttacttgtgccagagaagaaatagtcagttctgcattttaattgactattgcttgtatgaggtaaaaaacaaaataagacaaacaaaagtttgcaacagccttaacagagaagaccatttcctacctgaggtaagatatcaaggaacttcttgacatgaaagaataatacttaactgagtctcaagttaaaaagaagctgacagggataatgcgatattgaattctacttatctaaattgattcccacattcatcttaaataaaatgaaagataaatcctcatttggaagtaatgacatacttgaaaaaaagtaaatgcttcaattcaatatctccagatatatattttactttcatttctgtaatatttcactccatgaatttctgaaatgttcttcactggagattcttttaatctccaaaacttcatatccaataagattcattctcctgcttctcatttccttccaactcatggattgacatccttgagtaaaaacttccattatttaagctaatgtcatatgtctatatcaccttccatttaaaaaaattgtttaggcacttgtaatcctagcattttgggaggccgaggtgggcggatcaccactaaaaatacaaaattagccgggtgtggcggtgcatgcctgtaattccagctactcgggaggctgaggcaggagaattgcttgaacctgggaggtggaggttgcagtgagccgggatcctgccattgaactccagcctgggcaacaagagagaaactccatcacaaacaaacaaacaaaaaattgtttaactcctatttacaggtcacttttttatcttaccaagaactttagaaccttctccatcctagcaccaactataataatcagagatttaaatggctgttttgtctttccttaatatcccacaatacttcaaatattttatttgttatatatgtattaatatttactttaagtctatttatgtgtgaaatatgaaaagaaaagagttaaacaatattttgaacctctgttttaggaaaatatgtgaagaaatgaaaaaaatactcagtagacatgagtacaaattagagggcatgaatgagggcatggctaagcttaagatctctgggaaaagacctacagataagacagtttgcactatttacttttaatgtgattattgttggggaaagcagccccacaccacctggtgggtacctcgagttcgctggagacaaaggaattagaaagagacagaataagtgtttgaaaggcgggtccaggggaccggagcatcggagcctcgctcatggcccagagctcttcagctccacctaatttattggtttacaagctctttgttcttagggaagatgggaggggtaggaaaggatgaggaaaaggattaatcaaggaaggagaactcatgattcattcaataagatgtatagcagtggtggtttctgtgaatttccttgagcaaaggcttgtgtctaaactcttgttcccacaattattgatatgattacatttaagtttatcatcaaaatttattttatatttgccccatctggtattttttatttgttttcttttccatttttctgccttctcttgtactaattattttatataattttatctcttttgctggcttcttagctgttatgcttattttgatgattgttttagtagttataggaaacatctgtgatgtttaattctgaatgtcaactcgactggattaagagatacctagatagtggtaatgcattctttctgtgtgtatccgtgaattggtgggctgagtggagaatatctgccttcaatgtgggcagatgccataccgttggctggggctcagagagaacaaaaaggcagaggaaaaacaaatttcccctctcacttctggagatggaacacttttcttctgcttttggacatcagaaatccaagttctctggcctttggactttgggacttgtgccagcaccctcctgggttccctggcctttggcctcaaactgaaggttacactatcagcttccgttgttctaagggcttcagacttggacagccacactgccagcttccctgattcttcagcttgtagatggtctgttatgggacttttctcagtctccataaatatgtgagtcaattccccaagtgaattgccttctatctatctatctatctgtctgtctgtctgtctgtctgtctatctatctatatctatctatctatcatctatctatccatatctatctatctatctatctatctatctatctatctatctatctatcgtctatctatccagtctatctacctcctattagtctgtctctggagaacattgactaatacaacatctttaatatatcacagtttaatttcaagttatatcataccacttcatacattatataaaaccttacagtgtttctcccttctcagtgtttatggctagtaattttttactgggtgccagacactaatttttattttgctaagtggtgaatattttttatatccttaaaaatatttttgagtgttgatctgggtaaagttaagttcaatattggaaaaatattgattcttttgaggatagttatcttctaattagtctacctgttgccccataaatggcatgattttccactctgtgtgagtcctcgacacagctctctaattctttctgatagtcatttttctggacttgggtagattactcagaagtactccctaatcaccactcagatgaaaacctgtgaggcctctctgcagatctgtacagctgtccttggagtgagctgtctcctctccagaaccctgctttgtaaattacagctttcttgtccctccaagattcccagctccacttcttcaattcagggaatccactaggttccacataaactatcctgcctggtgctgtagcctagaaactctctcagacatgaagttgggcaaattgcaagtctcacttcatttgtttcctttctcttagagatcattaaactgtattgcgtgatgtccaacatcttgaaacaattattttgtatatcttgtctgattttatatttgtttaggtggaaggatgaatccaattcctgttatatcattttggccagtaaagaaaactaacacaagaacagaaaaccaaacatcgcatgttctcactcataagtgggagttgaacaatgagaacacttggcccccgggagggtggacatcccacactggggcctgtcggggggtggggggctaggggagggatagcattaggagaaatacctaatgtatatgacgggttgatgggtgcagcaaaccaccatggcacgtgtatacctatgtaacaaacctgcacgtcctgcacatgtaccccagaacttaaaatataataaaaaaagaaggcacaacttttattttttttagcatttcttttgtaagcatgtgttttatatactttatgctatgcagacattagtcagtgtttttagcaacttccagaaaatacatgaggagagtgtacttttgaagctaaaatacatggcttcaattatgttttgaaatgaaagacttttgttgtaaaattgttgaattcttcattaaatgactcgggttttaagacagctgtaataataactaacattacattactaatgtgattatgatcttcctgtgtattacaaactatatttcatgctgggtgatgggacttagggcttactgtgagatgattctagcttcatagcccagattgctggttattagactccagctcatacggcatcactctttcttattcttagcaagaacatggacaagttttcattttcagtgtaccttcctcaccctacagaacggttgagaggttatatcttaggcctgttaaaatcatggttgctttcagccgggccagtggcttatgcctgtaatcccaccaccttggaaggctgaggcgggaggatcatgaggtcaggagatcgagaccatcctggctaacatggtgaaaccccatctctactaaaaatgcaaaaaattacccgggcgtggtggtgggcgcctgtagtcccagctactcgggaggctgaggcaggagcatggcgtgaatctgtgaggcagagcttgcagtgagccaagatcgtgccactgcactccagcctgggtgacagagtgaaactcccatctcaaaaaaaaaaaaaaaaaaagaaatcatggttgctttcagaaaatgtcaacgttaaaattacatctacataaaaacttggttacagcaggacatacctcctccaaataaaagtatgttgtgatacctctttctttttgtagccatatctctgcagatatatttctgtatatttttatattaaaaaagtaacagatcttaaatatgtctccttgtgttttctgtactttaccatatttttatgacacttaaacattttacacttaagaataacacagatataaaatttgtaaagaaattaaaatatatcatttttagtatcagtagtgcaaatgcaaaagttaaaatgaaaaagtgtcttcctgaatctccctgaactgtgaaagagattttctagaaaataaatttactagagtgcttgaaaaaagcaagtatgcaaactacatgactcaaatttggaaaaatttgatattaagtgaatgcaaattagccttgatggacaaaaagcaataaaagattatcccggattgctcttccctttactaaagcagatgttgacagaaatattgcaatccccactatgttgacaagctacaacccacaaatgacattgctattttcaacagagaaaaagttcacagcttaaagcttttcaccaataataatactgtgctcaattttaaaataatatttatattttatagataatgattgaaaattttatgaatgaaataataatgaaaccttctaccaatactcagaaagaaaacacaggtatggctgtgttaagaaattcaatgataatattaaaaacagctagctcttaatcatatttcaggccatgttcaaatttcttatgcatataaactttatgcacataatgcatttaagatacaacatatcaaccattctctagggtgaggaaggtttgctgaatatgaatacttgtccatgtgcttcttagaaacgaacaacaacaaaaaaaacaatgaagctgcatgagctggaggttaatatccagcaattcagaatattaagctacagccatctcacagtaagccctaagttccatcacccagcatgaaatatagtttgtaatacacaggaagattataatcacattggtaatgttagttattattacagctgtattaaaacctgagtcattcaataaaaaactcaacaattttacaacaaagttccttgtttcaaaacataattgaagccatgtatcttagcttcaaagcacactctcctcatgtattttctgaaagttaaaaaaaaaaacaaccattgactagggtctgcatagtgtaagtctataaaacacatgcttagaaaagaaatatctaaaaatattatcaaataaccctatggaacaggcatcattattattattggagtcagactcaatcagaaatttgatttccaagcatctcatcagatattgggcctttctttttcatgggaatctatgtgaatgaccccagtggttcagtcagaaattaatctatttgcatagttgatggcttttaagaggagtgatttttaatttaacagtgtgtagttttccatgtgacagaccaaacatatagattacttgcaaaaggagaagagtcatagttctaccttctgaacagagtgacctcatctacttctggttctgcagagctggaactgaggttgaatggttccagcatcctaatagatatctggttgtagcttcatccaaccatcagggatccaggcccaggtatttaggggaacctctgcttcctaatcatgtgcccctttgagttgacagctttgcttcagtacatggagtggggcataaactccccatacaaccccagtggatagcacccaattattcatgtaaagcaaaaatgccactggggcaaagcaggtgtggtcttcaatacactaattccattttggaagctttcacatcttgttaatcatggaatactagtagacttagcacaaaatggaaattcaggctgagaagtcacatggccttgctgagtcaggccttcattttcaacaagagattagtggcaagcaaatagcagcttctaaaagaaggtgtacttggtagctgtgttagggaaacctctaagtccaaaactccaaggatcatcctggggtggaggttgcctccctttgctaaaggtttagtcaacaaaattatcagtcaccaagacttgttctgtctccatatacaaactgatgaacaaagtgctaggccttcgttttgatggtaggggtctgaaaagacagcagttttccctaaactgctggatggatgacatgaatctgcccatgtagtcctccaaaatttatttggtccatgaattttattgggttttctgtcatcgctgctgatataggtatgttaacattacaggcaggacagctgatactgctgcttctaacttaccaaatcccatggacgtcatctatataataaaagaattagttatgagatggtggaggtccttatgctaaatcctcatgctaaatccccaccaactggtggtaaatgagaaggaagtctgttgcattattctctctctctttctctctctctcgcacttcttcctcaatcaggttgactctatgatatttatgggatgaagaagttcaaacatacaacccatcaattcctgttatgtattcaagtgtaaaagcaacaaaaaaagagtccattgaattggcccaaagagccccacatacaaggtcatgtttgctttgttcccttccattgtgaaccttgcttgaacttatgagtaaaattcaagtgtcctctcgtttttcaagtcttgggcatctgtatccacagagccataaaaatgtaattacctctgtattagtcagggttctccagagggacagagctaagaggatacacacacacacacacacacacacacacacacacacatatatgagtttattaaggaatattaacacacatgatcatgaggtgaggtctcacaataggccatctgcaagctgaagaacaaggaagccagtctgagtcctaaagctgaagaacttggaggctgatgtttgagggcaggaagcatccagcattggagaaagatgtggatgtaggctggaaagctaagccagtctaatctttcatgttcctctgcctgtttttttctggccatactggcagctgattagatagattgtgcatacccagattgggagtgagtctgcctttcccagtccactgactcaaatgttaatcttctttggcaacaccctcatagacacacccaggaacaatactttgcatccttcaatccaatcgagtcaaccttcaatgcatcacaccctccattccccaaagttccccagaatatttagtctttttcttcttttcttttttgtgtatctatagttggaattttatccacctataaaagccaatgaagtactaatacatgctacaatttagacacaaaaatatgaacctaggtgaaagaaaccagacacaaaggtcacagatggtgtgatcacatttatatgaaacattcagaagctggaaatgcagagacagaaagcaggttgatggttgtcaggggcttgcatgaggaaggagtggagagtgattgctccatggaactcagttccttgttggcatgatgagagtcctttggactagatagaggtggttgttgcaacactgaaaatgtactaaatgccaccgaattatatactttaaaagagggatttcctaagtcccaggccatggaccagtactagtctgtggcctgttaggaactgggtcgctcagtaggaggtgaggaaggggccagcaagcattaccacctgagctctgcctgcagtcatatcagtggtggcattagattctcatagaagtggaaaccctattgtgaactgcacatgacagggatctaggttgcaagctccttataagaatgtaatgcctgatgttctgtcactgtctcccatcactcccagatgggactgtctagttgcaggaaaacaagctcagggctcccaccgattctacatgatggtgagttgtataattatttcattatattttacaatgtaacaataatatgaagtgtataataaatgtagtgtgtgattgaatcatctatccccaaaccacccccaaccctgtccatgggaaaactgtcttccatgaaactagtctctagtgccaaaaaggttggggattgctgctttaaaatgctcaactttatgttatcaggattttaccttaataaaagaaatttaaggaacagagacatggttctatgcagatttcttttaccttaagaagttgcaccacaatccagtgcttctgatgtgaggtggaatttctagtaggtgagagatgtcctaagtaccatagttttcagacattaaactacccctcttacttttatctttttaaaaaaggttcaacttttattacagagtaaaggttacacatgtctttttcttaaagcagttgagttgggggcaaacagggaacaagacatcagggagcatggagtggggaacacctcctcaccaatatgcctgccacgtttgtttttcatgtgatgcagagagatgaatcaagtgtcttttattttcagtttagccctctaccagcttttgacgcctttaccatctattatacctccttcctagaaaagtaagtataagaaaaaggctcatttatgtgacttggtacaatcatcctactcctcagcattactaaaactcaaggtagttggggtggaccttacctacaccccactccctttggccacaactggggctccagggagtattcttacgtcccacaacttggcccatatagggcccttgttctttcctttttcagaaaactctgtctctgtcataattccatcctccgatcgtctcaaaaattgccaaggtttgtcaacggtctaagattttactctactggcaagctaacacatttggttgtcacaatttcatggaaactggcagaaggcatgagactcctgggtcagagacaaagaactttattaattatggcacagcagcagtatgagctccagatttgcttcagtccctttgtcccacaaatcccacgaggaaggtgcagaggtgggcccaggcgaatactgaaatctatgggtttgtgtcatagctaaggaactctgatcttagaaaatccccaattttataaaaaagactgcaagcaaaactactaaatctttgcccagtagcagacttatttttgatgttctactcagaaataattctaccttttttttctatcttctaaaggattttttctttagaaacaaagttttgtcttcctagactttttgttataaaaacatccttgaaaaaatagtcttgaacaaaatcagtcataagatgtagagaaacaccatgaagaattgtcctccagaaaaatatttttcattcccttttcctaataaatgccttcaagaatgagaaggcagtatagtaaaaataacactatacaattattgattgcaggaaaaaagaaaatatctgttaagtccataaaagatgggtctttgctaagatctgtattttgatgttatgcatttatttatactttaggcatttgtgttccctgtagttctaatgtcatctatatcttactctgtactgataaaaataataaggaaatttaaagacacaaaaatatttattgcatatctgataatgatagtgttgtaggtaaatataaaaataccagtgtgaaaatgaaatataaatatctgattattttatgaacattataatatattatatgggggatatgtgggagataaaatatagaaagatttagcatgaaaaaagaaagaaaaaaatccgatatttacaatatctataaatctccagaagttggatgattagcaaagatcaaaaagtctgagaagtatatatggagaaaatgttttttctttttttgtatgtccttttttttttttttttttttgagatggagtcttgctctgtcatccaggctggagtgcagtggtgtgatcttggcttactgcaacctttgcctcccaggttcaagcaatcattgtgcctcagcctcccaagtagcagggattacaggcatgcaccaccacacctggctaattttttgtagaaaatatatttttcaaacaagtcatgccttctccttgctcactgcataaaataagtaatgctaattgtggaaattatagtaagaatgtgaacagaatgcagccagacagaaaaaagaaagaaagaaagaaagaaagagagaaagaaaaaagaaaagaaaagacagaaagaaagaaaaagaaagaaagaaaaagaaagaaagaaaacaatattgaagaatcacatggggcattgaaaaattaaataaaacatttaaaatatgaactggcctctttctcctcactgtaagaacctatggcattcactggtgtttttgctttcaaagctacaagagactcaagcaccaaggaaaactctatcatctttgatgctcaagatgtgaatatagaggacttttaacttttgtcagctttggtgcctgctttataataaaatctcaaaggctgatgaaggaaacaaaagtatatttggactttgtgcttgacaaactcctgactgagaaaatatattttgtactctgcctaagattgcttgatatacttacatgctgaagtcagccccttccccaattcatccccagaatcaagcaatactgtcagcaaattttacctcagtgccaaaaacatatcatgtaatggaggatttatcatctcttcttttttccatcaaataatgatcttgactttgtttttgtaccctcttgtctttctatattctaatagaatgtgaaagattaaagtgccagaaacaaagatactagtaacttttcttttcctggagtggagagtggggattagcatgcctgtgggttttactcatctcatgtaactctgaatataactgttagtccttgccactgatctttctaaaacaatataaagcatttcaaacattgtttaattacagtgagaattctatgtctcagcaatagatcttgaagataattaagctaattcaaaatgtaacttaaaataaactttaactatcttggaaatattaaagaaaatataatcgttcctccagctgctctaggaaggtaaaatagtcagtagacagttaatatttatttagagtttattttgtaacagataatgttctaatagatactgtttggcaatataacaatgcacaaaggccaggttctgccttaaggagttaatgtttgaataaattaagataatatttataataatatgtgacactaagtaggtgacgaacacctgctttataattttcctgatatgtggcaaataaagaaaatttagtaactaaatgttacattgtaaaattaaataaagtcttataattattgtacacaatcaatcttaattttaaataatgcaaatgaattttaggacactgatttacttatgttctaagaacaactggaggtttagagaaagcaattacatgtttgacagtattatatactgcaaaattcattttcactaacggtggcaacaagttaatgtataaaggaacaataaaccacacaatagcaattatttttcacattaatcaaaacataaatgtgtgctaattgtaatcagaaatttcagccttgagtcactctccttaaaacatctttattgagatataatttacataccataaggcttactcatttatagcatataattcaatgattatcaacctatttacagaattgtgcaactctcaccacaatctaattttagaatattttcatcaccccaaagaaaaacccatactcgttagcagtgataaaagaaaaacttcagccaaactgaatttaaaggcgtttaattgaacaatgaacaactcatgaattgggcagccttctgagccaggacaggctcagagattccagcgcagccacgtggtggaagatttatggacagaaaaaggaaagtaacctacagaaaacagaagtgaggtacagaagcagctgaattggttacagcttggtgtttgcctttttgaacacagtttgaacagttgggtacatttgattggccaaaactttgtgattggcacgagtgtaggctatggtctgtttctacctccacttgttatagttcacaatgtacagaaaaatctttaggctaaacttaaaatacgtaagcaggaagctttaggttaaacttgatttaagagcagtcatccccatccccccatttcccctactatgtaggcaatcattatgtctcaatggatttacctaatcaatatttcacagaaattgagtaaatactatatatggtcttttgtcactggtttctttcacttgtaaataattcttaaaacatctaggaggtgcaaaggtaactaaaagtgatgccatgatttaaatttgaaaaaaaaaaggccaatgagtattcaaaactcattctgtagttacgagtaaagatatgagaatatgtcttcaaggtgctgaaattcaggaattgtctaaatttctatagacaccaggaatgtgttttgtgtatcatgtcaaaaacactaccaagatgaattttaggtttctgcaattcatatgcatgcaagcaaagttcctatgtaagcagagttgcttgagctactcagtcctctctctctctttctctctctctttctctctctgttttcttgagacagagtcttgttctgtcgcccaggctggcatacagtggtgtgatctcagctcactacaacctccgcctccaaggttgaagcgattctcatacctcagccaccggagtagttgggattacaggtgcgcactgccacgcccagctaatttttgtatttttagtagagatggggtttctacccattggccaggctgttctcctggcctcctgtgatccgttggcttcagcctaccaaagtactgagattacaggggtgagccaccgcgcacagccctcagttctttaatgatagcttcttcttgaggtcccactttccaaaaaacacagttgagcacaacatctattacaatgcagaaaacaaaatataaatgccatacaaatgtcttaatttttctaaagttcctgtagattaacttatttaattcctctttaccataaaaactcagcaaatctaagttgaagtagcataacattattaactaatttaatttttcagttaaaaattgagcatagacttaactcttccaatcatacttttaattcagtataaattaaaaaaagattcaatgagctaaattaatcactaaagggatggaagagacacaggctatttattcaacagaaaatcaaattatatactatgtgccaggtgtttgcttgaaactgagattatattggtggacaagataagagtattattatcttagaaatttataatcaagaagaacataagactgaacaagggctagcagtagtttaagttgtttatcataataagataagtaagaagtcctatgtgagtaagtaagttagtttgttaggagtgttgaaaagtttccgaaatctacatacagaactatgcagaattgatccttgaacaatatggatttgaactgcaagagtccgattttacacagattttcttcagctctgccacttctgaaacagaaaagcccacccttctttttcctcctcctcagcctactcaacataaagacaatgaggaagaaaagctttatgataatccactcccactgaatgaataggaaatatattttaccctccttatgattgtcttggtatcattttattttctctagcttactttattgtaagaatatagtttatgggaagtctgtaagaagttcgtggaaaatgcatattatgacaaaactatgcatggatttcaaaactgtattttatcaaaataaactcatattaacttgttataacatgtctgaacaggatctagtttgagaccactaaagataaaacatcaattggaaaaaagcccctatcagagcaacatgtattctgctaagttaaagcaagaacaattatccaatttatggagaaattggggtggaaaattagagaaatcattgatgctttttgaaaagtttataggaataatatgtcaagaaatcagccatttgcaaatggataactcattttaagaagggatgagatgatgttggaaatgatgcttatagaagcagattatctgtatcaacttacaataaaaaaattcttgttcatgccctcattgaaaaggataaataattaacagcacaaacaatagccaacaccatagacatctcaattggctcagttgacacaattctaatggaaaaattaaagctaagcaaagtttccacttgactagtgccgaaacagttgcaccgacatcagctgcagacaagaatagagttttcaatgaaaattttaaacaaatgggatcaagatcttgaagcgtctcttcaaagaattataacagaagatgaaatgaggcttttccagtctgatcctgaagacaaagcactatcaaagtaatggtggaagtggtctaatcagagtaaaaacaagctggtcaagagcaaaggtcaagacaagagtttttgcggatgctcaaggcattttgcttattgatttcctggatggccaaagaacaacagtgtctgattattttgagagtatttagagaaagttaaccaaagctagagcagaaaaatgcccaggaaaactttaccagagagcccttcttcaatatgacaatctcctgctcgttcctttgatcaaacaagggcaattttgtgagagtttctatgggagggaaagcattaggcattcacctttctaaacttcttttagtttcataatcttaaaaattatttaaaaggcacccatttttcttcagttaataacgtataaaagaacgcattgacatgcttatattcccaataccctcagttttttatggatggactaaatggctggtatcatcacttacaaaagtgtctcaaacttgatatggcttatgctgagaaataaagtttatattttctatttttatcttttaatttcattttccataaactttttgaaatctctttataatacgtataacatatgaaatctgtgttaattgttcatgttgtcagtaaggcttctgctattagtaattatgttttggggaagtcaaagttgtattcagatttttgactgtgaagggggggcaggtttagtgctgcatcccctgcattgttcaagggtcaactgtattgtaaaagagtttcccctttaaattttttcctgaaaaaaaaaaaatatatatatatatatataaacaatggtagagcatttattacctttctactgcctagagtatctctgacatatgagtaaatggctatatgaaagctatacattccttatttcatttgatagtcaccaaaattgattttagatgtgtttgttaataaataaaagaaacatgagttcctttattatcctaaagttgagattgaacaaatgtgttttcctccattctctcttaaaatacgcattttaatgtttttatgtgatatgaagacaaagagaatgggagagaagaccataactgaaagaacaaacaaattcataagtgtctatttagctatttagaaaatagaaataggtctgttacctgctaattcacatagcagagcagagaaaagcagaagttaatttcctgagtgagagacgccaacaagatgaaagcaggttgttactttggaacttaaagactcaaagactagaggaagaattcaccagggaatgctgaagacaaatagagcaggatggggccaaaagcatttaagtagaggtgattggacgtgtgagtaaacaagagttaggttcttccccccaacacatttagtcttgttattatacatttcttacactggaagagggttgctgtaaaggctcatttctgaaagaatgaatcacagaagctctgaaattggggacacttagccaaccaagggcagagtttaggcactatttttgcttatgaatgaaagtctatacattgtgtagtaaaatatatttcagcccacttagcctcctaaaagctagcatccacgtttctaaacccacaggaaagtttagaagactgatatttatagaaaatgattggttcaagagaaaagatctacaaacacaggcatctacggctctccaacaaaagacttgatttcctatcctatcaacacatagtgaagctcacaagtatttaaaatatctatctttctggttttcagtgctttgtttttaaatataaacagagaactaagaatcatcacacatatcaggaaacctctaccataaaatgcagtttctaaaataaataaaacaaacaaaaataaagagaattggaaaatgcttggagttcaaaaaagcctccaaaattgcactctgtttatataaaagaatgcactagaatgcattacatcagtaaaacaaaaatggaaggctatcagtaaaaataatcctcagaaatcatagaacactaggaaaatttttaaatgatatattttatttatgatttaaatgctttagggatttgagcaggccccattagagttctgaaccaattgaacaattgatacgaaagagtagcacagctatgaaaaacaaatttacctttcttactgacaatgcttatgttgaagaatgtgacatataccgatgggcatgttgcctttgtaatgccaaatgctgagacagaattactctactcaccactgtagcactgacaaaaagtaggtttctctgcccaatgagggctaagtcttttcaaaaaacatttctggcatgaaggaaaaaaagcatagcaaattccatgctctcttaaagaaactcactgagaagagcaaagtaaaggaaagaggctgatgaactggcccagtttattcttccaaattacatggatgtgacttctgccgtcttggacaggggacatagaggagcacagaatgcccaagaataagatgtcagtgtgtatctttacacagaagaacatcaccaaaaggtcctttatgcatccacctgggaccacaggtggacagggcgtatcatttggcaacagacatttaacgtttgacagggaagtacatctatcgcattactgttatgccaaaagtttactccatgttgcagctctcactgcagattatgtccagatacattgaccaacatgtcctttatgaagtcgtgcaaaacgagcaagtgacatcataaagatactgcaataatatactgctatcaacgtagagattccacagatttgaatataaacctcctatcattataaatgtatatggaaacatgaagttcgaagattaaattccctggcaagttaaggtcctaagttagacacaacccaaggtatcaaagatcaaaatctaattattgtcttgtgttttaagagactgatgaaactgaaggcctacattaatccttcccatctcttcttctgtgaattctcagctagaatgtgattgttgggtgctggttccttcagcagctgtgtcttccacagtgtcatagtgattcttttaaggcctcaggatttaaacggcctcaacttgctcattgtttagaacccaaacagcaaattagatttaaaaaaagttaacatagcattagccctacacacaccagacttagaaaacaagccagtatcaatgatttaaggtggttatttcttggaaaaaaaaatgctccccaaagtcaatacttcctgttgtaaaacaccaaagcagaaacttgattttatctgaacaaaggcagtttaagaggaaagtactattttttagcttgccaagaggccaggctatgccagatgatgaaagtccacttaaaataaaactcaatttccatcaagaagtcaaatttttcactaatacaattactgttggcggtatgtgtgggagtatcttttcacactgtctcttctctcagagtgacatttgtgatattgctgctttctgcaaaatttcaaaattcatagtgtggacagctccgataagaggttttattgcaggaacttttgtttttcttccagcaccctcaaaatcttttaatcccttttctatttgagcccgtatttatggctacctcattactgtattgacggtgggctctgtatagtgacataacttcccttatctgtttttatctagagcattcagttataggacacagtggctgctttttctatagagttgttcagggtctgtaaaaactgcttccaaggaaaggtttttctcttctcctaacatttgtttcagctggagaatcagccccagaaaattcttgaagctgccattgattcaaaccctaacagcctaacaagaaccaattacgttgctctgtgcctcaagatagcatctttattcagcttctgggtaaaataaatattctgaggaaaatatcttgctgccgttttttctccagtagttggattgttcttctaatggtttatttttctctttcaggaaagttcagctatatatttatatttcaagttaaactgttccatcatttggtcaattttctctaatttctaaatttttaagcatacacagttaaattctgtaaaactgttattaaatctgaatttctttttttattttctcatttccattacgatttcttctaacacttttcaatactgatatttgaggctgccatagaatttaccaggcaaacataccttctccgctatcaatatcctgagttggataattgcatccaataaatatgctccaatcgatatccaatataggactgcagttgctatatttctccttttttgattcaccattttcatgcctcctatttgccttaggctaaacatttcacggtttagaaatttcaaggaattctcaagctgactctaaattccaaacatttctcaagcacatatcatcaaggtacagacttttactgtgtgtacccttccacaacatttgcatcactttaagacttgccattaactaagtatttcccaattcttgcacatgtagatgagttcaaagtttttcaataatttatttgttgcaagggaaaattaacctgagacctagcctgatatagttgaaaatattaaggagtttaaattcttagtagaaaatttttgtgttaaattcagagagaaacactgaaaataaaggaaatgagaaatatagcaatcgttaacttagggaattccagatttattcaagaaaatacatatagtcatacattgttcagctatgcaaaattatgaataaaaattcagttttaggtttttttttctccacttcagccttattttcactgattaaacattataggtctgagatctatcttgcctctaaaattttgaattcaatgttacacttctgatccataagttctttcacggcttctcacttcctttctcccactttacataatttctgacttcattaagactcgagtccattgacttctctattttctttcagttaattattccttcatatcttttcattatttacctctcgtcataattgacctaggatgcataagttcaacaattatctttactttttcatgaacaccaattttatctattgtctttcttccaccctatatcaaaataacttcaaccacaagattctacctgctcagtattcctactcttaccctgagctccaggaccctgctggaaaatgaaaagaaacaaaaacacatgaaactgtgcacaaatatattaataaaaatctaggccgggcacggtggctcacgcctgtaatcccagcactttgggaggccaaggtgggtggattgcctgaggtcaggagtttgagaccagcctggctaacatggtgaaaccccatctctactgaaaatacaaaaaaattagctgggcgttgtggtgcatgcctgtagtcctagctacttgagaggctgaggcaggagaattgcttcaacctgggaggcggaggttgcagtgagctgagatctcaccattgcactccagcctgggcgacagagggagcctccatcaaaaaaaaaaatgcacacacaaacacacacacacacacacacacacacacacacacacacatatatatgtactataatcatgtatgtcaaggttacccaatattcacatgaattcccagtactttccgtgtccatttcctactataactatttcagaccgtctgcactctgtcatccatccactgccaacacagtaaaaaacaatgaactcaaccccttgtcacaatccctttgcatctacagattcaatgcattcatttcttgatttaaccatttgtgtattatctcagggaaaggcatagtccttctttcagatacctattgccaaatttgccaattcacctgccctggtccctacaatctcttcattccattctgcgacaataaatacaatgaatagtgtgtctcagcttcattttttaaaaaaaacagggtggtggtggtagtatttattctctttgtttttaatgtaacttattgaattgtaagttttttattaaaattttttattaagatgtcattcacatactataaaagccattattttaaagtatgcaattcagtggtttctagtatattcatcaacttgtgtaatcattattgctatctaatttaagaacaaggttatcatccccccaaaaaactcaaacccattagcagtcacttcccatttcttcaatcccttccactggcaaccactgatttactttttgtctttatgaatttgccagttctgattatctcatataaccaaaatcagacaatatatggcctcttgtgtctgacttattttactttgtatgtttttaagatttgcctatgttgcagcatacatcagttctttcttcattcttttttacagccaagtaatactctattctatgaatatgccacattttatttatccattaatcagttggacatttcagttgtttccactttttggttatcatggaataatgctaccgtgaacattcatgtacaagttctgtgaacctatgtcttcaatgtcttaggtatatacctaggagtagaattgctgggtcagatggggactctatatttatctttttaaggaactgccaaactgctgtctgcagtggctgcaccattttacattcccaccagcaacttatgatggttccagtctgctcacatcttccccaatacttgttttttttaattgttaattataatttttaaataatgttaatttttaacaagcagcttgcaaaattgttcacgattaacaatctttctagaggtgggtatgagtaagctctaaaacatgctacatacagcttaccaaagaaaatcccaccatcttactacataacaaaggacactgtgattgactggtgatgtctgccaagcccaaagtttgtaggttacttttcaccaccttttcctcgagtctgggttaggctgtgccagaggagttgggatttaggggaaccaaaaggatttgggtttagcaggtacttcttattgagcatctctcataactagcccagcagtctccattctgggaaatgaccatctcctctatttatgatctggagtccttcatatcttgccttctacatatttcattcctgccatcatttctctctcttacaataatgattttccttctccatcagatcactctctgaagaccacaaatgtgctctatacatttccatcttaaaacaacctgctcccctgtagttcctctaccccatccagccccatcctcccttgatgttttgttcctcttcatttctctggtccattgccttgtctatttctatgccactcttggcaaatggaagatcgcaaacaaaatttaacaattcgatctctctgctgatgcaactctactggagctgttaatagtattttatatgtagtgacaatatatgcataaatcccaacacattattttgaaatataaatgttaatacatagaactgatgattcctgtggaataattatttcttaaaaattaagtcttaaaaggcagaacaagatggccaaatagaagcctccagtgagcatcccccttgtaggaacaccaaattgaacaactatccacacaaaaaatcactttcataggagccaaaaattaggtgaatgaccatggtacatggttttaacatcatattaaataatggaacagagaagaaggtaggaaagatagtcttgaattgcctatactataccttccttatcccccagcaatggagatgttccagggatagaggatctcagaactgctggcatgtggagcttctcctctttcccacagctgattctgcaatctggacctgagtgattccccaagagccccagctccctgggtgcctcgcctgcctggaggcatgtgcttgcatactacaccaccaggccaattgctctgtactcaccttgcctgctggcctgccagcctgagcaggtgtgtgcatacactatgtattaagatatctcatctgctcacacaattctccatttttccatcatacttcatgttatgagctgaattgtctttgctccaaattcatatgttaaagttctaatcttcaataggccagaatgtgactgtctttggaaattgggcctttgaaaggggcattcagttaaaatgaggtcatatgggaggttcctattccaatctgactggttttcttataaaaagagggaattgggacacataaagatgaatagataaggaaaatgtggtgtctatacacaatgaaatactatttagccataagaaaaaataaaattatgttattcgtggcaacatggatgatcttgaagggcattacgttaagtgaaacaagctaggtatagaaaaataaatgctgcatattctcattcatatatggaagctaaaaacgttgcctatagaagtagagaatacaataatgctcactagaggttgaaaagagtaaaggggagagacagataaccaaaggttaatggatacaaaagtacagcgacatagaaggaacaagttctaatgttccatagaatggcagagtgactgtagttaacaatttattctatattttcaaatagctggaagaagaaactctgaatatttccaacacaaagaaatggtaaatgtttgaggtgatggatatgctaattactctaatttaatcttacacactgtatgcaatgcatcaaaatatcacactgtaccccataaatatgtataataattatgtgttaattaaaaatgttgataatgaccaaaaaaagaaaggataccagacatgtgtgtgcacagaggagagaccatttgaggacatagcaaggaagaaatcgattagccaagaagagaggcctcaggagaaaccaaacctactgccagcttagacttagacttacagcctctaaaattgaaaaaaaaaaagtatgtagtttttgccacccaatctggattgtttggttatggcagcactagcaaactgcactgaactttgtaatgcactttatttaaaaactacatgttcaaagataaagttaagaatttcaagagagtggcagcacagcaataaaccaagagatcattaaaccaaaccttttgtgagcagggccctgtaagattgcacaggttgcatgctcacgaagctaactctgactccaccaaagctattcttagcagacagaaatacaggttttccatctctaacctcaatgaacatttttatttcttatcttaaatggtattctaaaggtccagtcctgggccgtacctttgattttgtatcttcctgcatcttctaaacttgtcctgttgcagcaatttccgtttatctgctaattagatgaaaagtatctttctgcatatccatgtgcacaatggacatttcaatgacatctcaacatgctttaacctaaaatctttaaaaaagtgaatgttagcagggcatggtcactcatgcccataatcctatagctttgggaggccaaggttcgaggattgcttgaggccagtagtttgaaatcagcctgggaaacatagcatgaccacatctctatgacataattttaaaacaaattagccaggcagggttgcacacactgtattcccagctacacaggaggctgaggtggcaggatcactcgagccctggaatttaaggatgtcaaggtagcagtgaattatgcatatgccactgtactccagcctgggtcacagagcaagactctgtctcaaaaaaaaaaaagttattattcaaaatatagtattttgcttctgtttgcatgaaaatgactgatttctaaattttattcttaactacatattatagaagtagactgatttacatactttacatgcattattccacttagttttcacaacaacactaaagtccacaaggctttagtctctaagttgtaagttttctttcttgcaaatactgaaatcttatacaaaatgcccggccgggcacagcggctcacgcctgtaatcccagcactttgggaggcaggggcaagcggatcacctgaggtcaggagtttgagaccagcctgaccaacatggctgaaaccccgtctctactaaaaatacaaaaaaattagccgggcggtgtgacgccggcctgtagtcccagctactcgggaggctgagacaggagaattgcttgaacctaggaggcggaggttgccgtgagccgagactgtgctactgcactccagcctgggtgaccgagtgagacttcatctcaaaaacaaacaaacaaacaaaaagcccaactgtccaagccagaaaactaagccagcatcctggcctcattcttccacattcaaccaggcaccaagttctattttctacctattacatccatcttcaatccaaccttttatcacttccacttctactacttactgctcttcatcttttctcatttcaattattgcaaaaacctaacttgtcatcttcagtttgaaaactattcctaggtttacatttataaaatgcatatcagatctaagtgaaacaaaaagtttcagcatagcatccaaggaattttataatgccttctgctgacttatctagcctgatctttcacatcagattctcaggcttcaacctgacttcatgcacctgtcatgaacttgggccgctttacctctgcatatgttgtatcttccctcatttggacccctgacttctacatcttgcaggtgactggttagtttatatgtcacctcctccaggcaatatttcttaattattctccctcccaagccagaatttctgtctgttctttattatctataacatgtagagagtagcaagatgttaacagaaattgtcttttaatcgtttgcttgtctctgacacctttagggaaataacttctgtttatttatatgcatgactctagatagaatatatctaaatgttgaagtcatcagatttgaaaacagaatgtgtgtgttcaaatcttaactatgacacttaatacctgtgtattaaaacaggtcacataattttaatgtctttttacctgagtaacatggggagagacacttcacaggaatattgtgaatagtaaattacttagtacctacaaaacactttagaatagtatcttgaacaatctacgctccctgtgatttttgataaaggaaaaacttccgccgaattaaatttaaaggagtttgagcaatgtacgattcgcgaatcggtcagcccacagaatcacagcagattcacggagactccagcacagccacgtggtggaagaagatttatagacaaaataagggaaatgaggtacagaaattggcattgaggtacagaaacagctggagtggctataggttggcctttaccttatttgaacacagactgaacactgaggagtctatgagtggttgaaatatggctgctgggattggccaaaactgttattgttacagatccatactcctaagttaggttttcaattttatctgactattaagctaggttacagttcatccacaaggactcaaatatcaaagtatggagtccttcttgggccatatttagattgctttaacaaattttatacagacataccttggatatattactggttcggatcactcttaataaagtgaatattgtaaaaagtgaatcacaatttttttggttttccagtgcatataaaagttatgtttacactatacagcagtctattaagtatgtaatagcattatgtttaaaggaacgatacacatgccttaatttagaaagaccttattgctgaaacttactaaaatctgaggcttgattgagtcataatcttctagctggtggaagatctgtgtcaatgcagatggctgctgactgaccatgcggtggttgctgaagatgggaatgactgtggcaatttattaaaataggacagcaataaagttagcttcattgattcactcttcattttacaaaaggtttctctgtagcatgcagtgctgtttgatagcattttactcacagtagacctttttccaaattgaaatcggtcatctaaatcgctgttgctgttttatcaactaaatatgtataatacttgaaatcttttgttgtcatttcaaaaatgttcatagtgtattcaccaggagtggattccatctcaagaaaccactttctttcctcattcataagaagtaactcttcatctgttcaagttttgtcatgagattccagcaatttagtcacttcttgaggcttcactttgaatcctatttttcttgctatttccaccacatctgtggtttttttctcccctgaagtcttgaactcctcaaattcaaccatgaagtttggaatcagcttcttccaaattcccattaatattgatattttgacctcttcccatgaactgtgaatgtctttaatagcatctagaaagataaattattttccagaaggttttcaatttgcccaggtgtactggaagaatcactatctacggcagctatagcattacaaaatatattttttaaaaaatatgatttgaaaattgagatgacttcttcattcatgggctacagaatggaggttgtattaccaggcataaaaacattaatctccttgtgcatctccatcagagctcctgagtccccagattcattgccaatgagcagtaatattttgaaaacaatcttttttccaaagcagcatttctcaacagtgagcttaaaatattcagttaaacatgctgtaagcagacatgctgtcattcaggatttgttgttcaattcttagaatacagcagagtagatttagcataatttttaatggcccaaggatgtttagagtggtaaatgagtgttggcttcacctaaaactcatcagctgcattagcccctaacaagagaatcagtttgtcctttcaagctttgaagccaggcattgacttctcctctatagctgtgaaagtctaagtcagtattttcttccagtaggaaggtgttttgtctacattgaaagtctgtggtttagtgtagccacctttatcaatgatcttaactagatcttctggataacttgctgcagcttctacatcagcacttcctacattaccttatacttttatgttatggagatggcttcttttcttaaaccacctgaatcaaactctactagcttcaacctttttttttctgcatcttccttatctctctcagcccttacagaattgaagagagttagggtctcaagtaaatgttgtggctggtttgatcttttatccattcaaacttgctctatatcagcaataagactgttttagtttcttatcgcttgtgtgatcactggagtagcaatttaatttctttcaagaacttttccataacattcacaacttggctgtctggtgtaagaggatcttgaatttgacatgattttctcaatatgctcagtcattttaaaacattgatacaaacttccttttacttgaatgtatagagattattgctggattcttaattggcctaatttcaatatttttgtgtcatagtgaatagcaaggcccaagtaaagagagaaagacaggagaacagcaagtcagtggagcaattagaatacacacagtatttatcaatcaagttggccatcttatatcggaacagttcatggtatccccaaacaattataatagtaacatcaaagacgactgatcatagattactataaaaaacaaaataattatgaagaagtttgaaatattgtgagaactatgaaaatgtgacacggagacataaagtgaacacatgctgttagagaaatgatgccagtaaacttgggtcaacacacggctggcataaaccttcaatttgtaaaatacgcaatatctgtgaaggacaataaagcaaactacagtaaaacaaggtgtgtgtgtttgtgtgtgtgtgtgtatacataatatagatagtgtacaatagaaactagatactttataagctcttgttaattaaatgaatattccaacactctcaaagaaaatgactagtttttatcataatattacctttaagtataagaacataaagtaagttggcatagtcatactgctggcaaaatactatatagctaaacagagattgcaggataattaagattattcacttaacttcggggagtagaaagcaaaatgtgtaaatatccatgctcaattacaggaaaatacaattagcaagcaaaagatagtgtctactccctagggagatgtctgtagaataaaatattttgtagtaaattcttgattagcatatatgtttctctcctagattaattgttttcttattatgtttttacaaaatgggaagtcacatattacaagtctataaacaaatatatattgagagagagaaagatttattatgggaattacttcataaaattatggaggctgagaagtctcatcatctgacctctcttcgagtccaaaggactgagaactagaagaactactgctgtaagttccaaagtcccaaggcccctgaactaagatctccaatgtatgagagcaggaaaagatggatatcccaatttaaggagagagaaagagaaaatttgcccttcttgttctatttagatcctcaaggaattggaatgcccaaccacattggtgagtgtgggtcttctttacttattctactgattcaaatgttaacagattctggaaacgttctcacagatacacacagaaataatgttttgccagctctctgggcagctcttagcccagtcaagtttacatataagaataatcaacccagctttttataatcatcttagtatttaatcaaggaaatgatatcagctatctactaccacaaaaataattttaaaaattggcttataaaagatgacttagtggccctcagctgggacagcttgtcactatccaaccagcctttaaatccttccaagaagcaatcctggcttgttctcctgaaaactgggtagtttttcaagagattgagcagaagcatacaaggcctcctgacacctaggtgtgagatgggcacacaaccactcctgtcaaattctattggccaaagcaagtgacaaagccaatgcagatttaagaggtggtggaaaaaaaccctaaaaatagaagttgttgaaaagtcatatttcaaaagtcattggtataaagtagtgaaaaatttgacatttttgcaatcaagcttatcaaacaatattatcccaaaatataacaatacactcagtttgcacacttgtttaccttttgcaaaacaggtaagacagtaggacaaagcaggtgctttatgttgtttcaatcattcaggatttggacagtttggatattttctgtatcactataattgataaatactcagatgattctatagttaagttagaatggaaattttgggtatagtaacaaatactactttaatttaaacttacatgtaaacagtttccctaaagcagttagaagtgtgaccataaaagtgaaatggtttaaatacatgcatttacatctgtcctagagtgattaatgtaactttattataaaactactaattttgtgattacatacacccttccaaagatacattatacattcctatgtacactcaaatattatttttaaacttccattccaatcattaagtagaaatgcatttaagaatcatgatttttttagagtaagtctataggtggtacttttatattatagataacatttcctataccctttccacataaacacaagaacattatgctatagattgaaaattcctgtaaacactaagcagagcttttgtacataaacttgtaaaaactctacataaatgtattcagaaatacatgctattaaaatattttattgtatattactgtttggaagttttcagcttaaatatttttatttgatgatcaataagatctagtattaaatggtcttatttattaaccattaagttaaatacatggagaaatccactatgtcttttcctccagcctgtaagtaacacagggttgcatttctaatattaactaagttacatgtattttccattgagaagagtgctatcgaactcatccatgttaaatcactcttatgtggaaaaggctaacatataaataaaaaaactagaaaatttaaaaaaggataaagaaagaagaaaaatgaacagaatttaacagcagtgcaacagtagtctcttcctacctttcctgggcatcttccaattttatggtggtctgataagctttccaaaacactttgctcatttccagcactggacatttacactcaagactgcagactcgaggagtcacacactcagcatcttttagctgtatgttgtcaagttcagactactcaaagtggcatgtctttaaattagaatgtgtcaagtgggtctagtaactgcaccgaaatattttaatagtcatattaatcattaataagtcaggaaacatgtttttctaattttcagatcccaatacacatgactgatatggtttgcatctgtgtccctccctaaaccaaatgtccagttgtaatccccagtgttggaagcggggcctgaggagaggtgattagattatgggggtgggtttcttgtgaatggtttactatcatcctcttgatgctgttctcatgacagtgagttctcaagagatctggttgtttaaaagtgtgtagcagctcccctatctttctcttgctcctgctctagccatgtgagatgccttgctctgtctttgctttccactatgattggtagcttcctttggcctcccccagaagcagaagacattatgcttcctgtacagcctgcagaagcatgagccaactaaacttctttttttaatatcaattaccctgcctcaggtgtttcttgatagcagtgcaagaacggactaatacatctgtcttatgatagacacaaagtaggtgcccggtaagcatttgttaaataaatgaataggtacatgagaagtggaccccctgtaaattcaaatgaatgtggttttctatatgaaactccactcaccttgacaaacacatataaaaaagaatgttgaaaagaatagtgctatatcctctctgagattttctttttacacatctgctactcagatagaaataattttctcattataagaaagtgctctcgatgtactcatttcatatcatcccactagtcatattttcctgcccttaattgtttacgagtctgtctttaactttgtggtcatagttccttgatgaccgggatctttttgatttctgaagtgtctactacactgctgggtaaggagtagatatttaataaaactgtatggatgggaaattgaaacactcaaattgctgttgcctaagctttttttcatgtattcaaccctaggagaaatcactgtttacaaaattctttgatccctagttgttgaattagtaggtgccaaaagtcctattttataatcctcttgagctattttggtaaaaaaacatatcaagtatgtgtgtcatacatcttaacccagtcatcagttacacagaggcctgatctttgtctctgtgacaaagataacccagtcatcagttacacagaggcctgatctttttagggtttttttccaccacctcttaaatctgcattggttttgtcacttgctttggccaatagaatttgacaggagtggttgtgtgcccatctcacacctaggtgtcaggaggccttgtacacttctgctcaatctcttgaaaaactacccagttttcaggagaacaagccaggattgcttcttggaagcaatccttagtttgcctcaaaactaagacatagacaagcccatttgattattttacttctcattacctttacaaatgagcagaggatacatacctgatgtgcatggatcttgtgtatccttgaatcttgcaaaattttatagctccagtggccactctgaatgaaaaagcattttggaaacctggcaccataaaacattcatctgccaggatatgatgatatcttgtcaggtcattaaaaatcactttctatttgacattttcccatttaaattcctcattttgagtgccatcatcttctttccttttccacaaaaatgcgcacgttttcaatgcttgcacgatctttttacttcctctaccttgagctttagtcttctaggttaacaatctaagtgtgtgatgtttgtaagtgtctgtcttcatttcttgaggatgcagttcccaagagtctgcactctaattgtgctttgttgcaaaaggggtttgatgtttgctgagtgaataagaggttgaaacgtgtcttgactcatagatcttcatcccaggtacccaattctatttcaaataaaatggaagcctgctctggaggtcctgagattagagcataacagatccacaccgggactgctgcatactagatcagttagtatacttctttatgtatcatttctatcatttagattgtttagataagaatacttccttgtagattatttccatcctttagattgtttagataagaatcattttgtgtcaagcacctttatattaatatacttattgaaataattaattcatagggaataattaaagtaatcgtaaatgaaagaaaatactcattgcaaagtgctcacattttcacgaagagatgctaagaattgaattaggccttaataactacataaagaaagaacgaatacaacaaagatatacacacacacaaataagtataaaaactttcctaataaaagaggcagagtacttaacgttataagtgaaatatttaaagacattttgtgcacgttgaaaacaaaaagatagtttacccaggattatggaacatttttctattgaacttataaagttttcctcctggctactgttaatattaaatttgataaaaatcttgaagagttctttggagactcatttgatagaaaggagaaaatgcatagtttccaaatgttcataccacgtttctctatgaatgatgaaatataatttcaagcctctttcctaagaacagtgttttcagcaaatgtattatttgaagtaccatgagtcagtgtgaagttgcttgaaaagtagttgttatctaataacctcctgtcaaaaactcagatagaaatttgcttgtagagaaataaaaaatatggcaattttgatgatctattttttaaccttagaagttactctctgcctgtctaataaaacattctgcaactaagactatttggtatcagaaagttaattactttaagagcacatacaaattgaggaaaaagaaaaaagttttggtgtcattcaattctgattctaattattaaagaaggttctaatggagacattaaaaatcaggagcatacaaatctactttttaagaaacaaaaggacggccgggcgcggtggctcacgcctgtaatcccagcactttgggaagctaaggcgggcggatcacgaggtcaggagatcgagaccattctggctgacacggtgaaaccccgtctctactaaaaatacaaaaaattagccgggcgtggtggcgggcgcctgtagtcccagctactcgggaagctgaggcaggagaatgtcgtgaacccgggaggcggagcttgcagtgagccgagattgtgccactgcactccagcctgggcgacagagcgagactccgtctcaaaaaaaaaaaaaaaaaaaaagaaagaaagaaacaaaaggacaaggcagtgtctcatgtatgcaatcccagcagtttgtggggctgaggcagaaggatcacttgaggccaggagttcgagaccagcctggacaacctagtgaaactccaactctactaaaaacgcaaaaattagcctggcatgatggcacacacctatagtcctagctacgtgggagtctgaggcatgagaatcgcttgaacctgggaggtgaagcctgcagtgagccaagatcacaccacttctctccaatctgagtgacagagcaagattctgtcttgaaaaaagaaaaagaaacacaatttttttcacaagcgccactaaaaaaagtgatcaagaagtaccagttactttaaaaaaattgttgaaggtagaaggttcagaagagtattgagattcatagaaacaaaacaaggagttagtgacactgaaagcataaacaaatataaaaaaaatcctgagccagagacaaagtgggcttcctaagattttaaatgtttaatatcttcacttatacatttaaaatctaaaataataaaatgtattcacatgagaatatattactttaatagtgttttattttcaaatataatttcacagtcagaataatagatgataaaaattattttgagcacttattgtcaatgtatataatgacatcaagattgactagatcccccttaatcccatttcttttacttggtctaacaggaagatttcacaggaaatgtaagaggactacatatcccaatctcttttgcaatgtagttggatactgattagttccagcactttggataagggtaaagtttcctatactaattccagttaaatctgtccctgatctccaaaatctcctaaaaatcatgagctctctccttctctccagtcctcctgggctttaaggagggccagattattgcacacaacttaccactttgagagagttagtactttgagggaaactcttcaggagagacatctaatgtaacctgttgactaagaaacaaataggcaaggtgtttatgccaatatcttaggtgatttgtttcagcagcagacaagtgttatcctaatagacaagtgttatcttcactatttagcaatcatgtttacgtgacatgtctcctgccataagatgaaattacgaaaaacctagtattgcctctagatattttctatcagacagtaaccatgaggccatttcacatttctttttttcgatgtttttaatttctccagagagtatgtattaggaatgattgattctgcagtcacaggtaatcagcttttagtcataatttcattgtcaaaggtgaaaagagggggattttcttctctgcttccctccttttagctaagtgattaaaaactatcagtgtcaaaatctattggaagtaacggagtcatcagaataatactctcagtacattcatttcagtgtcatatttctatcactttaaattataactgaaaagtcatcagaaaatttatattgtgcctccaactaacagttatgtgaacttcataaagacttcattaggcaacatcattgcaagaagcattgtaggtattaagatacatattcctcggtggctgtgttatgagcagatgttaaatataaaaatttaagtccaattcaattgcaccatatcccatagcaataatttattacatttacaatgattagtcatgggaggtattatccatataaataactcagttagttctgcttaatttttgtaaataatggaatattatttgaaatgccaagagaaccgcacttataaaataatcagaataaacttgtatttttaattattcatgcttcacaaatagtttgttatatcttaacttttctatcctagcacaaagtgatttctctctgctaatatctacacacacacacacacacacaaacacacacacacacatacacacacacagtctttcaaatcatctcatttaatcttaacagtaaagattcaagctaggtgttgttatatgttttataaaaaggaaaaatgagacacagagaattaaaagtttcatacagctgactatcagagcaagattttaactgaagatgtctgagtcctgagcacttaatcactgagctaatgttttatcttaagatatcttgtgtttccatttgtagcatcaggaaacctaaattttagtaggtgtttctccaactgtatgatatcagataacatatttatgttttcatgacccaatttcctcaaagaaagcatttagatagttgtacaagggatatctgcttaatgaatgaattgattaatgaattttaatttataactatcaatgtgtttctttttgaagaacaatctctttatttctgagacaaaatacatgtggagtctctacagagaaagtagagaagatcaaattatacaaacgtgtatgtatatataatctacaaaagtctataagcaaaattaattactactgaattttacaggtaaaaaatcaaggttaaatcaaggatcacatattcagtaggaaacagaaatttagaagtctgaagggcagttagaagctgagaaatgtatttctagagttcacgttcttaactattacgctatactagatcttaaataagactacttttgttaaatttttttctttagcttgaatttgcagttatttaagatagttaaaggaacagcaatagagataaaatggccactttcattactgaaaatgttgtaagtggagaaatgaattttgatgcacggcagaaatggacggtcattacgatgatgatttgaatcccaaaatagacatttgtattcaccttgtcacaggtagcactagagaacctcagacctctccacatggaagcatgcctgggaaatcctacagtgtcgagacacagtgcacagtgtggagtgcatacttacaaagggcaactagtacctaaaggcaaaaagagaagagaagggctgagctaaccatgcttaatttctacccccaaatatgtcacatggagtggaaaggccaatattgcggttccaatagcgatcacctcacattgaaagtagaggtaacagaaaagactgatcctccctacattcctttatggaatacaaggaagtagaggaagacagtctgaaaataactgaaaaaaatgacaataaaaattcatgcccgtattttaataatgtttgtttaatttttgatatcattatagacttacagagcattgcaaaaatagtattaggttagtgcaaaagtaattgcagttttgccatcactttcaatggccaaaactgcaattacttttgcacaaacataatacaaagaattctgaatactctacacccagcttcccttaatattaaaatcttaactaatcataattcaattgccacagctaaaaaactatcaatgttacatattattagataaataacagatttcatttgggttctctaatgttttcactaatgttctttttttttttttttttttttgagacagagtctcactctgtcacccaggctggagtgcagtggcacgatctcggctcactgcaagctccatctccggggttcacgccattctcctgcctcagcctcctgagtagctgggactacaggcacccgccgccacgccagggtaattttttgtattttttagtagagatggggtttcaccttgttagccaggatggtcttaatctcctgacctcgtgatccacctgcctcagcctcccaaagtgctgggattacaggtgtgagccaccgcgcctggccactaatgtccttttatgggttcaagatttagttcaggatcccacttagcatgaaattgtcatggttctttcatctttattctatctgttgcagttcttcagtttttccttgactgatagtgggcactcaaatagcatacaatagatcataataggtatatcctacaaataccatatcctaggaaaattaaaatagataatgcattaaatgtaactggtatgcaatagacagcaattggcataatgccaattggcataatgctcaaataatggttaatatatcaatattattacataaaaatatacatataaactttaaatttgctgcaatctagtttttctttcagccttttctcatctcatccattacacactcttcatcctgtgttgttctggcaaataatcctgatgactttgtgtctattcatgttccttgcttctccaattttctaattattactgaggccatgtcacctagatatcattagatgcaatatacaatgtcttaattttaaaatttacattctgtgcttacttattgatttgacttggctgtgtccccacctaaatctcatcttgaatttagttcccataatccccacgtatcgtgggaggaacccagtgggaggtagttgaatcatggaggtgattacttccatactgttctcatgatagtgagttctcatgagatccgatggttttataaagggcttttctccctcttcgctctgcatttctctttgctgacaccatgtgaaaaaagatgtgtttgcttccccttccaccatcattataagtttcctgaggctgccccagacatgctgaactgtgagtcaattaaacctctttcttttataaattacccaatctcaggtatgtcttcatgagtaacatgagaacaggctaatacatttactttcacaggtatgccttttctatgcaatttcaggattgtttttgcttcttcttatttgtgcaattctatactttttcagatgtcttttcattttatttgcttatttgtgctttgttttgttccagatgtttttctcttgtcatccttgaacaaactgaactctctgcaaattcagaagaattttgaatttcccgcgatgccagttttgtcttttaaatgatactcattttcctttccaaaatgtcgtgtgtataagatgaggacagaaagaacattttcctgttaaaatcctctgacattttagagttattattcttacagagtggctaacattaattaccctaaaacactcagtatatatctttaagtcaaatgcatattttctttgcatactaatagggttttcaaactctcaggttctagctagtatctctattttactactactcacaaggggtagcataatttcctatcattattagatggtacacatatatgaagagaaagaaaaataatgaagaggagaaggaagagaaagcagaaggggaagggagaagggaggaggattgaggaagaagaaaggaaacaggggagaagaacaggaagagaagaaaaacaaacaactattcccccacatgctgtgatattataacttgttttgtcttttgtctcacacataatagttttgtgtggtagcacatcctaaaatataatatactcagcaaagcttagtctctctagttcaatcagctttttgttcccctgctgttttgtctctatgtgtatcgagaggcatacaagaagcttgtgggattagacagaaaggtcactgttctggtctggtaaggagtagtacccatttcaatgagggaagattttgcaatgtgtattatgttaatcatgtcattgagcaggaggctaacggtagagaaagagtggcacaatgttttatatttttccaaataatttctgtttcataattgatatttggagtaagggtcagtagatgatctataaggcatctgtgaatcagactttgtgatagagatggctagtagctggtcaaaggtttgttcattgctttcacaatgtagagttattatataagtcagttgtggggccaaaagtgacaatttctagcccatcttgtgttttctgaggtccatgtgactgggctgaaattttgtattgtatttccaccattggcttctaataatcctttgggtattatctgagagagaaatagcattttatcgattttcaaaggattgtttttttctaaaataatacaagatcaggaataaaatattttcagaactatatatcataaaaatattttgttttcagtattataaaatttccccacactaagtagacattgaactggagcagataaaagctgtgtaaccaaaaggtccagttacttagttctgtggtaatagtcttgaggagatggacgaggaaaagctgaccacactctgctaagagctggacaaataacatcaagtaatctccttgaaccctgctctcatcggtttagaccaccagttctcatggtattctttgaccatcatgtcttggcttaagaaaaacatgaatctaatattctcatccattccaagtcacatccattttgagaaagagcaagatcatgaggttcttttgatttgggatgaaaaacaagagattaggatgaaggtaattggtgcaaacattatctttgtctcccaaattaatgagctttacggtttttacttctttttttaaacatacagcattaaagtatatttcataattaaacagactaagcaggttggcaaggagtacatataatttagtatatcagcaaagctctctattaataatacaacattctgaaatcattttcttagagttaaaaatatattctcatgttactatacacatgaagcaacaaaatttaacatttatacaagtaacttgagataaactttttctgtctgttcattacagatataccaaacacaacaaaataatataaataacctaaataatataattgatagcgacaatgcatgcagagagtatgtatatatttcaaatacaaaatataatattttcaaacattactgaaaaatttatacacataaacatatacaaccatacacaagcacacaaacacaaaacgacaacactaactacacttgtaaactaggctataaaacaaacagcaataacccatgtaaaaattgtggagtccacctattaaaaaaagtgctagtgatttaaattagatagttttatataaagatcaaaaaatcaataatatctcatgagtatagatattgagaactattgcatatgtcaaactgctgcctattgcagtatttacatatatgtttacctatatgcatgtgaataaaacatgtattgtaaatgtacatgtaaatatacagaattagacagtaatttattagaatggtaaccgttttcttttttcattacgtctaggtaacccattacagtctgatcagtctctccagaaacaacagtgaatgattagaatcaatgtttctttcctatgcctttaataactgcatttttacaacctatacaaaatctttattcacatgataaatgctggtaaattagcttatgtgttttcccatactcaaaatttctttacagttcaaccacagggggaaaaatgctttcttatataaaaaaactaaataaaaaacaagaactagttagaatgattgaatacaagtccatgtattcagtctctccacatgagaacatataaaatatgcttcatcaagaaacaaattttcaatatgtatgactgattttatacaattcttaatgcttgtttcttttgaatacctttgaagttaagggcacaaagaggattagaggaatatatgttgctttgtatttcaatagaatattctccaatttttttaaaaagcaaaagcatgctcattataatcaatcaatatatagatatacaaaagatgtgtacactcttaccacacaattgtactcagtgttacataaacaatgataggaagtcagtatgtatctcttttgtttttatagaaatgtataaagtcatatagagttttttttggtaattttgttgttttgttgttaacatttatttccatatcaatatatgttatataactgctctgcaacttgaattttttgcttcacttggtgacaataacagcacaataaaaacatatcataatcaaatagccactacggatgagtattaacattgttcatattgcttaactaatgcaaatatttcagtagtaaacattcatatatccttattactgattttttatttctgtgggatagttcactggataaaatattcaagtaaaaggaaaatcattttataaatattctcaatgcgtaagtagcttgagatctttgagaaagactgttggaaaataaaattggcaagtccaaatcttgtaggagattatagtccaaagtaaagaatttgttttatcctaggtgcacaaaaaattctctaggaggttttaggcaatgaggtgacaagaataaatgtctttaccaagatcctcgtggtggttatataaagaagtcccccaaaagttaataatcccctgacaattatggtgaacattttatattgaactgaacacttttaatgatctcttacacctattgcagcatatctattagtacatcaatgtcaggattccactcaccttattttgttaccttattgattctttttattagaatttcaggttctggtatcactgaaccattgcatgatgcaggatatggtgtgatgcttagtaaacatcagcttggtaaatgttgatctatggacacctagaaaatcaaacaggactgtgatgtcaaatagttagaaagttaattgaaattcaatattgactaagtaaaatttggtgagacataagacctttttgagtaactaacattttatttaagatttttgcgaccagatgagacatatttgggaagatggagaataaggcttttggcttagagaagacctagtacgatagattaaggaggtaacaagcctggcacagaaaaaaaatgcacatttgtcctaatcacaaatgctgtgaggtggtttaacaaaagcagaattactttctcttcagatatcttctcccaatctcagtaaatagcacgaaaatgtagttaagtgatcaaaccaaaattataagattccttcttttttttttttttcattctttcagctcccacacaaatagatagtattaactcactcatttctctgtgacgcaattgttagcacagtagtccaaaccatcaacttctctcatctggactgctcagcattcccacctgagggcttcctgctgctgtcgttgtcccttcaattcattctgtcccctgccctggctttcttgttgcctgaaaaatctaaccctattggctcctatatgaggtggaatttgtttctcttgtctataacttgacttttaatttatcattagcttaaaatttcttttttaacatagttttatttaatttcaagtagtcaaatccatcaatcattttacttacggtttttaaatatttacatattatttgaggtaggccttccacattccaggatttaaaaaaaaaagattagcctcttaaaatttttagccttttatggcttatgttttaaaaacaattttgttgaggtgtaattttaatactataaaattcatctatcctatgtatataattcagtgatttttattaaacttacagttttgccagtgttaccacaattcagtattagagtatttccatcatttcaaaacttccctgagaaggaattttagtcaatctcagtttctacccccaaatcctactactttgtgttcagtcagtgtgaatttttcttttagagacatttcatataaatggagtcataaaatatataacctttgtgtctaacataatgtttctgtgctctaaatcagtagatcatttgtttagattactggatagaattcactgtatgtataaactgcattttgtttactaatttactagctgatggatatttggattccttttacttattggccattatgaacaacattgctatgaacagttgcatacaagtgtttttcattttcttggttagatgcctaagagcagaacaagtgggtcatatggcaagtttatgtttaacttgcagtggaacgatcaccgctcactgcagcctcggcctcctgggctcaggagatcctcccaagtagctgggattacaggtgtgcgccgccgtgcccagctaatttttgtattttttgtagagacagggttttttcatgtttcccaggctggtctcgaactcctgatatcaaacaatccgcccgcctcgcccttccaaactttttggattaccggtgtgatccaccctgccttgcgtttagcttctttagaaactgccaaaccattttccaaagtgtgtgtatcactttacattcccacttgtcagtgtatgaggattccacttcctccacattcttgcataaacttcttttctctttttgataaaagctgttctagtaagtgtgaggtaatatctcactatggttttatttttcatttccttaataactgatgataagtatattttcatgtgctatttagatatttttatatattatttgatgaaatgtctaattaaatatgtcatccattttaattggatatttgtttcctcctattgcattatacgagttctttttaatattctgaatataagccctttgttgagatgtgattttcagatattttctcttgctctgtggtttgccttttaattttattagtcatgtcatttgaaacacacaggttttaatattgaaaaagtctcaattatcttgttatgtgttgtgtttttgttttatcggttctgtttttggcatcatatctaagggactctttgcctgacagaatgtctcaaatattttcttttgtgttttcttctaggagttttagagtttcaggttttgcagatctggtttcagatctaagatctactattcacttggaatatctttttgtgtataatgtgaggtaagaacacattttttttttttttttgcatgtggacattcagctgttcaagcaccatttgatggaaagactaattttccacattgatttgccttaatatctatgtcaaacaacaattgacaatgcatgtaaaaatttctttctgaattttcaattctgttatattgatctatatgtgcacttttacctcagtaacatattgtcttgattttggtagttttatagtaaaatttgaaatttggaggtgtaacttcaaacttcattttctttttcaaaatatttttgtcaattatgagtcctgcatttctgtgtttcttttttaaactgaatatatttttcttgcataaatatttacatagaagtcagtgtgttataggaataaacagagtttctagttgggcagatatactatatcattattatttatgaaacattaatgaagttatagttacagtatttgggccttttattgtatgtccattagggtataagaaaaatatctatcttacaatggttcaataactactttgtggaatactttattaaatattttccttctttttaatcaacagttaagtgttattaaaagtattttctatgtgttctgatattaaaaatgtcttaagtattttcaattactataataaatgttcataacttgtatatttatatcattccaaattacttaaggtaaattctgtttttaataataaatatgtagatattataaattaatatagcatataaatatataaaagtatatctatatctaaattatataaacatgcatgtatgtatatacacacatcatgtatgaacaagacctcagaaattgagagtggatataaattcttatgaaaaaaccctccgttgaactgaacacaaaagcatatacagggagagagcaagacaaactcataatgtcagcggcatcacagagagtaaaataatactggttttaattagtccggaaaaaagagaggtattttgtgtaactggcacttaggcattgagtattcataaggcaatgagtattcattcttataaagttgtctttataagattctgcatttattattcttgttcacctttattactatagaggtgaaaagggtgtcatgctcttcttcacccatcataagggtcacagccgacggtcctattaaaaaagacaagctaataagagcaaagtgtaacaagtttattttatcaaagccttcagaaatgaagacccaaagacctagaaaaaaatctctaaaatatttttatgcttaggtttgatgaagaatgaacagcaatgtggaaatgtgattggacaaaagggtatgatctaatggcagtaaactgaagggggaactccagcaattcctctctgtccagattctttttggactctctatgtagcattccttcctcctgaatatggggtaggactcctctggaattagggtattcaagagagaagagagagagtgtggcctttcttggtcttatggcttgattttggggagaatggctctagtttctatgacctgttcatatggtctggctctgtgcccaaaccaaatgtcagttaaaattgtaattcccctgtgtcaagacagagggacctgtaatccccatgtgtccatggagagaagtgattggattatggggtggtttcccccatgctgttctcataatagtgagtgagattcacgaggtctaagggttttaaaactgaaactggaaaccatcattctcagcaaactatcgcaaggacaaaaaaccaaacactgcatgttctcactcataggtgggaattgaacaatgagaacacatggacacaggaaggggaacatcacacactggggactgttgtggggtgggggaagcggggagggatagcattaggagatatacctaatgctaaatgacgagttaatgggtgcagcacacaagcatggcacatatgtacattgtaacaaacctgcatgttgtgcacatgtaccctaaaacttaaagtataataataataaaattaaaaaaaataaagttctactacaatttaaagaaacaaaaaacaaactaacaaaaaaaaaaacaaaaaactggtgttttttcctgtgctctcatttctcttctctcctgccaccttgtgaagtaggtgtctgcttccccttcgccttcagccatgattgcaagtttcctgagacctccccagccatgctgaactatgagtcaattaaacctcttttctttataaattacccagtctggggtattctttgtagccctgtgaaaatggactaatacacctgtcttggggaagaggaattctgctatgacatgattttggggagatacagggatgacaaacatgaagatgagagaaggtcaaaaagaccttgcttccgaggttcttccaatctctttcagttcaaggtactcagcatgtcaaagtgccatactttggggtatcgtgttctgagccccaacattgcttgtgtacattaacaaataaatgattgataaataattaataataagattacgttttaaataaatttactcattggataaaacataactaaccatgtgaatttctctgtgtttccctcatgccttattttgttaatgcaggaattggccataaataaatttgttatggtggtagaaataaaacgtcagtagattgtagctttctagaactttgtgcattaaactaatttctacaacctctaaatttaactagttattttagctggacagaaaatccaaatgaaattgacatgacatttgaatgtaaataaggtgaaaagcatttcttaatttttgcatttttagacatagaaaaaacaatgattactctttttactcaaagtggaaatatcctatagtcttatgaaatttttcacatctctataattgttaatattagttaattttacttagacataatcaactcttttgtttaggtaaaaattctcaatagaaacatttatttcattagcacattttttcccaaaaattttaccagagggaatttcaaaggttaatatctggtattaaacaaacaaacaaacaaagaaacaaacaaacagtagccgtcttgacacagttttgtccattacagagtgagccatgaaacaatattttgacctatttactactataatacccttgagaatacatcagcaaaaaagaatcaagtgccttgttttctctggaatttgagcttggtggagctcctgcatctgtactcatcctctcatgctaagggagtaattacaagtgttcaagccaaatccataaatcatgatgtggtgagaactctggtttcctttgatgttttccttaagtgaatgcaatctcagtggcagttgatatccactaaactgttcttgcaaatgcttattacatttgaacttagaagcaatttgtattctctgatgggcttttgtctttgaaatgtccttccccttataatccaaatggaatgtcaatgttgaaccttttgttcagttacattcaggaaaagaaacaaatatgattgtatattttatagtgctaaggcagtgcatttcaggaatacttgcacacacagaaacacacaccgcatatatttgaacaggtagattctacataaatcagttttagatttttttttcagtgtcgccttttgcttagtttgctgtccaatattaactttttctacatctggactttttgtatatccacttacttcgcatatttctttttcatgtctttaagagtatagttctgaacaaaaactaaaaaaaaatcagagaaaatcaatttctgagagatagtatagtttagttagaggcattatagcttatgtgaactctaaagtaaagcacacttttgctcaaaacccagccctactactgagtagatgcttgagcctatcgttcaaaatcgcaatacatgtaaactattattatctatgtattaaatgattaattggagatttgttttaaaaaaattctgggcagaacaatgtaagatttggttaatcagaagggatagaataactacatgtggaagataatttgcatgtatcattctccattcctgacaaattacctggcagaaatattttcataagaaaatcctttcctccttttgatgaagtattaaatatgtatttttaatgtattccacttaagtgacgtaaacattttgctaaaataaacttaaaaagtacaccagtaatctcctgctcttttaaagctcaaatactcatattgaggtaaaaataaatacataatattaaacagtgtgcttcaatatttcccatagttagatgacataaaaatatgttatggaccacatttctcaaccataagtcacacctaccttatgctgtgctccttttccttaaactctccctgtgaatttgtgcttcatcactaaggccaaagaaaaaagtttaaaagtgataacttctctgagatatttgtaccttaactacagaaacacaacagataaaatcatcgttaaaagcaatgaaacaataatgacaaaatcataattataggaacatattcttttgaaaaatatttcctgggcaccatattatgatgctttttgtacattgtgttttttaaccaatagccaataagttgtctaatgaccatcacatacaagtcagaaaaaggaaaggcagatatgttaaataatttgctggtactcatataggaaatgatggcaaacctgggacataaattcatgcttgctttgttacaggtgtgtgaattgatacttaatatgtttcctgacacttaaaatctattaatttcttgtccatcttcagtaatacttggaagcccaaaatacagatgtttaatctgttgctggtattattaggaggtagctacataagtaaatattcaggtcggacagggcaacctaggtatttaggaggaagaaagaaaaccgacaaaaaatagagtaaagaataagcaagcagttaagatgtagaggtggtcgtaaggtaggaagaaggaaacagatttcaagtactatatataaattcttaaaacatgtacagtttacacaattcaccattgagtcttattttatacacaagaaagaattgcaaagccatcaaatgtttattgaccctaccagtgggttatatattaaaatcacttctagttgagtcttgagtgatcaaaaataagacccagtctctaaaatttaggtgaaattttataggattgcttcaatattatttctgtttgctgaaaaggtaataataccgaaaaaaataaaatcatggaaccatactaaaattatgataaaaattcaaataataactttgaacgcttcatccattggtgataacttactataggcaaaacatctgtcatgttgtgagaagtgctgatgaagtttattaaattaggaaggcaataataataattatttaaaaaatagaattacataaaaacattcaaaattattttgcttgtataaaacaactggtgattaaccacacatcagcaattatttgctaagcaatgattacctgcatctctataaaaattaattcttctccaaaaggcttaaaatattcctacagagaaattatcatcagcatattctagacattttctaaattgaacattgcctagaaaattgtcagctctttttaatactttttattactgataagtttttaatacattaggatgaaaaagaggaccagcaaggcaaccaccccagggtgttatgacctttgtctcttctggcagcattcatctcattcatgtttcatacaagaatgattggttccatggaacatacttaggaaaaccatacttaaactataatgccctaaaggcttgatttgtttgacttcttgatttgctctacaaataaaattgttaaacaccgacatggtatttggtaagagattgtaattatatatgtcttggaaataaggacttttagattgggattcattcattcccaagtggatattggctatgcagcttccatactttaaaagaaatttgaagcctctttatccttagtgcagcttactctagacacattagaagaaacaattcatttacaatgttatatatattttgtagcattcagtattaataataaactaaagggcctgatgaagctgtactctactaggaatcatgcatatcttcagagaagtgttgaaaattaaattctccgtagtattattaagaaacacttatagccaagagaaaaaataaaagtaaaaagatgattactatcctcaactctgtaacttcttactatgtcatagtgagtaaatcatgtaaatattcagaagttactttatgtttcataatatgtggattaaaatacctattcaccttaattatggctgacttttcttaacccacagaatttctacttaggcaatttatgtgaaaggatgaatttatttattaaataaatattttacaatgtgctggagagataaagatgaataagaccaaatcctgccctcaaagaatttcttaaaggtacccttaagactcatagagtttaatgaaaaaagaaaaagagtcaattactatatcatgtgcttaaaggagcaacggagatcatggaaggatttgagggagcataagagaggtacctaaacattggcctcaattatatacctagggaaagatgactcagaaatacaccacttaagcctagctcttgtttatttcctgaactgaaaacctgaatatccaacttcttcctatatctcttctgttcgatttctcacaggcatctcaaatgaacaggtctataattgaactaatctatcctcccaacaactacacttagggggtcctctatttttttcttgtcactgtaaacagaattcacattcagacaggtattcaatttcttgtctagttatccaactgcttccagagccaatctttatttgaccttctcaatttagccacattggacttcctttagccctctaatgtgttcttcatcaccacatttctcactctcattccatgccctcctagggtaaaggtttcatttactataacgaggcatactggagtggtgtcagagtttgaaagggtttaataaagacaaagtagaagctgtcaatgaagaaggagaggttacaagtactacttacagaaagaaaagtctgtgtttagaaaaattaaagggaaacattagtcttgtaatactaggaggctataacgtgctttttaggatgatatcacggaagtttgaaatggagaatagcactttaagtgcacttctcttcctcctagtcttcacgtttaaataagtcaaaaactgataagagtctttctcgtaatgtttccctatcagttcctttgttttcactgtcagagtagctatcatggttccaatcctttaccattttttttccttaaaaaaaatctctctctctctctttctctctctctctctctctgtgtgtgtgtgtgtgtgtgtgtgtgtgtgtctgtgtgcatgtgaaaacacttctttacttttgctttctacaagatgctctgggttactttgtgtcttccttgtccctgaatctgccatctcttcacggacctggtttctttgttagagatggtattagataccaagatctgtggtactagatatgctcattgctgtgatggtgccactgcttatagtcctactgagcagacatcagataaataaatgtgtgtatattaatcatgtatatacaaatatctacaaatatgtctatatgtaaccatctgtatccatattaaggtgagcatgagttaatagcaatgcatccaattctgatccattgctacaaggatctttctagccttgtccccttgtttatttgtagcttcctctccaactgtgagaaatatggctcccaccacccatcattcatttaactagtgtctagtggtatcagaattgttaaacagtatgtccataggaaacattatcaacgtgaacacagtacttacataaaattttctgaacttttaatcttcaaaatttcactgattttcaaagatcagtaaaattgttttacagatttgtaatttagctagtttttttaacatgttttgcattctctcctcccatcttctgaacttttgattttttttaaattttagaacattaggtttattattttccctgtaaagttctgtgaattttgactaatgaatagcatcatgtttccaccatcatattatttacagaatagtttcaccttcctgaaaattcctctgtgtttcacctattcaactctccttttctccctcctaaaaccttgacaaccactgatttctttattgtctactatgttccctttttcagaatatcctatcattggaatcacaaagtatatagcttcttcagattgtcttctttcacttagcaatacgcatttaagatttattctgtttttatagcttgatatctcatttatttttatcactgaataatattctacgtgtagatataccaagtgtgttcagtcattcacctcttgaagagtatctttgtttcttccagtttttggtgagaataaagtgctagaaacattcatgcataggtgttttgtgaacttgttttattatttatttatttatttatttatttatttatttatttattgaaagatggagtttcgctcctcttgcccaggcatccattgattgcaatggcacgatctcagctcactgcaacctccgcttcccaggttcaagtgattctgttgcctcagcctcccgagtagctgggattacaggcatgcaccaccatgcccggctaattttgcattttcagtagagacagggtttctccatgttggtcaagctggtctcagactcccgacttcaagtgatccgcctgcctcggcctcccaagtgctgggattacaggtgtcagccaccgtgcccggcctgtgaacatgttttcaattcagttcgttgaacacctagatacacaatcgctgggtcatattaagaggccatgtttcaaagctgtataaaacaccgcaaaattgtcttctaaaatggctgtaccattctttatttccaaatgcaatgagtgttgtttttgctctgtaccctttccagtgtttgctatggtcagttttttattttgttgttgttgttgctattattattattttcaccaatctagtaggtttttagtgatatctcatttctgttttaatttgcaatttttgtgatgccaaatgataatgaacctcttttcatatgcttattttccatctgtgtgtcttatttggtgaggtgtcatttcagaacctttgcccattttttaattgtgttgtttgttttcttattgttgagttttaacagttctttgtatacttttggatacaaaacctttatcagatatatggttttcaaatatttctctcagtctatggcttgtcctcttgctatgtctatggtaccacctcaagactgtgaggcccaaggagtttcttgctttcatgacaatccacactcagccttcagcaattcatcaaaattaccattaagttttcctaccagtttatcgctccaatagcttctgttttaggtaagttgccttctctaaaataaagttgtctgaggtcaggttgatgttacctttttttttgtcattaaccccaaagcatgtgaactctcatgtttatacatatattccttggttaaccaaacactgagtgtctcctaatggacccaactcaagagattcccattcctgcacttatagtaatatctcataatgtatttacacttcctaaaaatgtaagtcttagaatataaaccaaaacatgaaataaatattcacaagtccatactgatacatggttatgaataaataattcactaaataaagatagaaaaatacaaatctgcccataaaaaaagaattccaaacaacttgtatagatattcccccatcaaggatgtggccgataaccccccattccttaagagtggatgacacataaatgaattccttccaaagactatagtatgcaatggggctgggagccagaaaaactttacagtagaggaacgtgataagctctacttcaacgagttgtccgagactaatatcatgctggtagtatgacagtgtgttctttaatacaatgtgatacaagtggtacttctttgtttctgtggttttcctcccaagaacacataacctcagtctaatcatgagaaaataatcagacaaattctaactgggaggcattctataaaatgtctgaccaaatctctcaaactgtcaatatcctgatacacaagaaaactctgataaacaatcatagtcaagaggagcctaggaacatatgatgattaaatataatgtaatactctgtatgtaaccctacaacagaaagagagacgttagataaaaactaaagaaatctgaaaaaaaaccactaaagattacataataatgtaccaattttgtctcaatgatcttgacacatgtgccacactatttgtaagacattaataataggagaaaatgggtgtggagtgtatggaaattttctacacacaatcttgctgtatttcagtaaatctaaaactgttttaacaattttttaaagtttgtttacagaaattaatgacacataaggtagagatgaggttatggaaaaaacaaaaggaattaagatagagacaagcttgttctggtaaacataatttatgccatgaattggaacatacctgcatgagttgggaaacaatattcacttgattaaatctaacaatgagaaatatgcaattagttctaagactgattgcccaaaagaaaaactgaacagaacagcacaaaattctttagaaaaagaacaaaaatacattctattaacaactgagcgaaagcctccatccattttcttacagaaaaaaatatatattaagcctcataataatttttatatatatgctaaacaaatacatattttggtattattatttggctgcttatataaacacaggcacatgcatttaagcaatcacaattacgaatttttatttcacttttaaagtggaaaatcttgatttcattttctggttgtgtgatggttaatattaagtatcaacttgattgaaggatgcaaagtattgtttccgggtgtgtctgtgagggcgttgccagaagagattaacatttgagtcactggacttggagaggaagaaccaaccacaatgttggggcggggaccatccaatcagctgccagcgcggctagagaaagcagacggaagaagttggaagaagctggcttgctgagtcttccagctttcatctttctctcgtgctggatgcttcctgcccttgaacatcagactctaggttctttggccttcggactcttggacttacaccggtggtttgccaggggcttttgggccttcagccacagactgaagactgcactgtcggcttctctacttttaacactttgggacttggactaagtccctactggctttctacttcctcagcttgcagacagcctatcatgggacttgtgatcgtgtgagccaattctccctaataaactcccttttatatatacatatagcctattagttctgcccctttggagaaccctgactaacacccgttgtagacataaaatgtcagacgatacaagacattgtaaaagataaagtaaatgttcaattgcatacccgacccagaccaccacccaacccgatccttaagaaatagcaaattttagaagtatgatccaccagaattaatttatgtgcttatgttttaagacaacaaataagctaaaagccatcattttatacattcttttgcctgctaatattttacctatctctaaaggattctacctggtccatacacagacatcattttcatttaacattttaatacttttgtcttaatcatttaaacttttaattacatagatatactataatatatttaagttatctccttaaaagggatatttaattttcaatatcttattcattgtacactatactagtttttatattcattaacatacattttgttctttatcaacgtttccctgaaagaaaaaaagatctaagaccataatattctatttgaagagaaagcaaatgtatgtctaaaaagtgcctttcctcagccttgttaagaccacatttcactgtttattcagttctcaatctttttcaataaaaatgtttaaaaaattatatatcaacgttgtatgcattttcttttttcaggtaaacttaagaataaccatgttcctttagtttcttcagtaacaatatacatttttatgtatatatatatgtatattttctttggctaaaggttagaaatgattcaaattattaattctgtgaatagacaaatattaagatatttacagtactttcattattacttaaaatgaattaaaatacccagataaataggctgtgatgttaatggcagaggtattgctttaaaagtattgctttactataaatattttttaggtacaggcagatctgaagggcctgaaaactcttatggattgtaaacacaaatcacaggctctggccaagggtacaagtagtaaaatctgtaacagttgatccattgattctgcccagtcagctggaaatcaattctttgtaagtgaacatggctctgaatttatgaaggagcctgaagccctcaaagaacagaagtcactctgctgctgaggcctattcgagggtggcattatctggcaagcaagtttgttagtatggttttttaaaaatgatagttaatacacttgaccttcactcccttttactcaaaatagcaagttttaaaattatctgcaaaacagaaaatgattctcagccaagaaaagtgtacattgattaactgtataccgaatgtgtgcaatatgtcatgtgggaagtattttcagaaattagaaagcagcataaaaatgaactcaaaatggaaaagttcaccaaaagtgccaactagaactcacatgttttctaatgtccaagtatcaaaaccaaaacaaacaaaaaaactaagtttctaatttaggagaaaaaaaggagcagcgaaattatttttacattataagtgccacctaatatattgtcacagtatttttatagatatccagtttgtatttctcaaaaataaaaaacaaactatattatgattcatatatgctatataataacatagtttaccttgagtttataaactttaaacagaaaattgttctttaaaattcccttaattcagttcttatttaattggttttaacaaagctacattttgtaataaatccaacaattcacctttattttatatggactaaactataatgattaaatatggtgactttattctttaaattatttatcccacctgtaacaatcataatgcttccttatgtcattcatgttaatggccatatctttctctttgagtaaccatatctcaatataggaagcatctcacagtttgcttctatttatgtctcattcacaccaaattagcattgtgtataccagtctcccaagggaaagaggaaaaacattctgagcagatttgaaagttagttatttggcactatgttctaaaaactttgctgactttttgacatatgccagcccatgtgtagctaatccagaatcctcttaggtaatgctacctccatccttctttcactttaaaaacaagtgggcttgaaaacatttcactagtggagtatagcacatcaaggatcgggctctttccttctcaataacgtatttttttaaaatctaaaacacagaagggattgaccctaagatatattttttaatatgtcataagaacgagtaagtttgctatgtcataacatttctatagaaaaatagacaaaagcccacccaaaatgaaaaggaaaagatgtattcaaatatcatcagtgtgattcatttcaaaagttaaagaaggtcatgatactaagggagagaagcaatgtccggtcttgcctaaagaagatgattatgaaaggaccattccattttcctctcagataaaatgtgatacgttgggattaggtattcatttctgtttgatgtatgaacttattcaaaaaaggtgtcaaatacaaagcattggtgtccaacaatattatttggttatcccttaaattatcctttaaaatgtgcaagaatatggtatattccattttatattatttcttacttatactatcagttgaaatttaatttttatttttaaaatttttcattatttttgtggatacgtagcaggtgtatatatttatgtggtacatgagatattttgatacagccatactatgtgtcataatcacatcagagccaatgtggtatccataacttttagcatttatcctttgtgttacaaagaatccagttatacacttttggttactttaagatgtacgattaaatggttattgactatagtcaccctgttttcctatcaagtactagatcttattcattatttctatttatttgtgcccattaacctttgccaattccccccatcccctcaccaactacccttagaagcttctggtaaccatcactctctctatcaccatgactttgttttaatgtttagctcccataaataagtgagaacatgtaaattttatttttctgtgccttgcttattatgttagaaatatgttcgatttataaagcttttatatgatgatgcaatataaaaagagcctattagttaattttgttattgacaagaagatggaagattctttctaaaaaatatcatatgaaaacaaaaatgcctgaacattggtaaaataatgaatccttctatcacaacacaatagtagaattattgtatttacatctttaaaatacaaattttattggttaaaaattttattttctttacaaatcattccttgattcttaacagccccatcttactctgtttattgtattttaatctttactattgcttttaattaggtgactaagagatctgaattctaaaagaatttagatttaaaagatatttcagctccaaaatgtgaaagcattttgtttaaatcttaattgcatcttttaatttaatattcaattataatactattataaggtcaaattgagtggagattgtctaactttattaacatcggcataattgctaaaaggatagaattttcagaggtcatctgattcttgttcaggatcatttcttatcgattgaccaggaaatggaacagtttgaggttttcctctaattatttaaagccatcttcacttatctcattatatatttataatgtttcaaactaatcatgatgattatatctttataaaggttactgtaagggattcagccttcactataaaaaaaaactgctgcaatttcttcaaaacattaaataatagaaagtgtagccactgatttggaaaacctgcatgtaaataagagatcatctgttaataattttagtaataatttagaacaatttgtatacttatgctcatagttccataaaccacatattgtggttttctgggaagtaatatggtgctatataatatgaagatatcgttactcttatgcaaaatgcaatattaaagcttctactcaagaagtttacactttccataggtgcaagtgtagttatacatttgcatatttagtttgcattggaaattacagggatcattttaaagaagtaatgttggattaatttttatgcagttgtactttttggaaataaaattgtattaataataccaaatggtgctttttttgtttgtttttaaatggcaaaatccccaaccaacctgctctggtagctcctaatgtatttcaggtagatccccacagctctttggaatgcgaggctagaggtcatttaaatgaaatttcatatagagacatatgtaaaagcatttcacttaattagaaagcattataaaatatatgttcaagcattattaaaggaaatcgatttctggataaataagaattttagtgaaattgaatagtattcacatatactgcctgcttgtttctgctttattattttctaacaaatagaatccacataaaaatgttgtatcttaattaaatatttgaaggtcaatgttaaacttatttttacttttaccaaaaagtacattttacatatgactatgtaattaggtatttttctgaaattgtcaggaagtactgtgagtaaaagtgtaacttctgtgaccacgaaataaattttgttttatgacagtttttattgaatatgactacagctaatgaagtattcataaaattataggtttgggaaagaccttgagaatacaattagtctatctcctttcctgatcactttaagacactttattattccatttcattctgagaactacagggaagataattttataaaatctttctgtgataatacatttcaagtcttttaaagcaatgtgacagttctcttttttcagaggtctgctgctctgaactatgttttatcttttaaaagtggctgaagataataatttgtacctacgaaagtagaattttcttttttccctatatttaccttttacttttttatttatgatgaaaatacacattcaaaaggtaatcctcctcttgaatattttttctgctttcatcttagtaccagtaatgtcatctcttaagtgattcttctaccattaaatagataatttcattttttttaatgtcagactcttttgcaatttttagctggaatagatgttgattcaaattactactataagtttcaaggccttttcacagaatgatgtgttaaagccagcaacacaagaaaaatgtagaggatccaagagttgatgcataagaacaagcagtcatataagccatagtgttcatagaaaccagagtgcctttaatgatccggaaaaagtctgtaattgttaatactagtacctcatattccaaggcacaacctgacacagaagagactcgcagatttttttttttttcttttaagagacagggtcccgctccaacacccaggctgcagtgcagcaacatgatcatagttcactgcaaccctgaactcctgggctcaagcaatcctcccacttcagcctaccgagtatctggcactacaggtgtgtgccaccatgcccagataatactttttgtagatacggggtctcacttgtgttgcctaggtaggtcttgaactcctggccaaaagttatcttctggacttggcttccaaaagttctggaattgcaggcatgaggcaccatgctcggccaggaactcagaattgattgatgtccatgtctataatttttggcaaaactgaaatccagagatgaagtacctctatacaaaagcgggtacaaagcaaaaacacatacatttctccctatatgcaaaaaaataataaaacttcattgtgactttcttatcactcttaaaactgaggtttctaacacatactttactcgaaactctatctagatttccattttgttcccagttctttgctactctgtgcccatatttcatcaatgattatgtactggcattattttcattttatcactttgagaacacgaacttaggtttatcttttaattttaatgtttaatttacaggccgtgaaaaaagtacttctagttacgattataaagaaaaatgagaaaagtaggtagcatggatttttatacaaactgtttttaaccttttttaaaataattaccaggctcaaagtgtgctgataaactctttggtatccatctcaggaaaaagaattcatagtagctggatcacaaagactctgtatctagttttactttcttgattgaatcaaagaacaagtcaaaaaattgttcagaacacaacattttgatgttattaattcaacaataaagtaagagttttacaaactgctgaaagataggaacatttgtgattcctgaccagagagtaaagataaagttagaaattatgtagccttctgtaaaggttgcttggttcataaaggctaaaaagacgaggtgctcttagaagaagtagaaactcttcaagggaaactgagctctctgtaaagcaagcaaaggacaaattcctatggaatcattgtgtaagaaagaaaagattagaacgagaaatttcaaaagtattacttgactgagtgaataatgtagcgacaacacaatattccatcataaaaatttcttcagaggcctatattaatgcagcccattaatccttggaattcttggataatatatatttcaaacattccctggttgtctggtagttagggttaggcactctccatatatattttttctccttttataaaaataaatataaaactcataacagacaaagagaaaattggaaagaagttgataaaattcatctccaaagaaaaaatgaaaataacataatttgatatttaaaaaaatctaaaatacattatacttaacaacaatagatagaatcatgaaggagtcttatttgggagctcattaaggctaatttaaattttaataagacaagtgttattgccaatctgaggtgtataaatttgttaatttctatcattaattctattattatccttctcaaattaattcagagcttaaaaatcatgttactatctatgtagttacctttccctttattcttctaaggctgcattgagtttatcagagaaaagaataccaaggaatattaattagttatcttgttgtgtagaatttatttaaaattatagcgcttaaaacttagttataaatcctaatatattgctattacagacataaattgtattggtgctatcgtaataaaaaagccatatgatatgagatgttaaaaataattattcatatttgaaatagaagccctatattttaaaatgttacaaagaatagacaagaataccattctaaatccttatatttgttttcactgatagattattcttagctccttagagaggtcatggcctccaggcatttaatctgtggttgagagatattaacctctctttaacattttcactgtaagctgcataacaataaattcatttccagaaaggaataattagtgcaaacctgggtaaaataccatccaaagtagctgttaatgttaatttctacatctcattatttatttttgtgtgttttcttagggaagggaaaaaattatgtaaacacagacagaccccttccttttttgtatcattattcaggcacgtgtcaaaaacctttctaccaccacattctggctgtgcaactttgattaagtcgcttaacgtctctgagccttagttcctcatctccatgtgggaaagcgaagagatggtcaccaaggagaagctgcagtgtctgaaagatttccacaaggacatcctgaagccctcgctggggaagagccagagagcgcggtctgaggacaaggccgagggaaaacctccgcagaggcagaagtggtctcgtctagcaagatcgacttggtgatctccgtggctggcggcttcgtgggcctggtcaacgtctggcgcttcccatacctctgatacaataatggtaaggtgaatttctcatactttcctgtttggagcggcctgcctgtgtttttcttggagatcatcacaggccagtacacctctgaagggggcatcacatactgggagaagatctggcacttgttctctggcatcggctctgcctccatcgtaattgtgcccttcccgaacgtccactacatcgtcatcgtggcctgggctacagactacctgttccagtccttccagaaggagctgcccagggcacactgcaaccacagctggaacacgcccccctgcatggaggacaccatgcgcacgaacgagagtgtctggatcaccatcagctccaccaaccttacctcccctgtcactgagttctaggggcgcaacgtgctgagcttgtcccctggaatcgaccatccgggctctttgaaatgggacctctctctctgtcttctctttgtctggctagcctgtttcttctgcatctagaaggatgtcaggtccacggggaaggtcgtctacttcacagccacgttccagttcgccatgctcctgaggcagctggtccgagggctgatgctgcccggcatgggtgccggcatcaatttttctctgtatccagacatcacctgcctcgagggcgcacaggtgtgtattgacgctacgacccagatattcttctcctaggccatctgcctgggggccgtgacctctctacggagctacaacaagtacaagtacaactcgtacagggactgcatgctgcctggatgcctgaacagtggtaccagttttgtgtctggctttgcaattttttccatcctggacttcatggcacgaaagcaaggggtggccattgctgacgtgtctgagtcaggcctggcctggtcttcgttgcctaccccaaagctgtgacaatgatgccactgcccacgttttcggtccctttttgttgttgttgttgttgtgcttctcttgcttggactggatgaccagtttgttgaagtcgaaggggagatcacgtccttggttgatctttacccatccttcctaaggaaaggttattgtcgggaaatctgcaccgccttcgtgtgtagcatcagctgcctgctggggctgacaatggtaacggaggttggcgtctatgtctttgactactacgcagctagcggtgtatgccttttaggggctgcgttctttgactgtatagttactgcctggatatatggtgttgataatatttatgacagtattgagaacgtgatcggctatcgggccgggccctggatgaagtacagctgggctgtgatcactccatttctctgtgttggatgttttgtcttctcgatcgtcaagtacacacccctgacttaacaacgaaacctacgtggacaccatctgcaccatcgggctgggctggagcctggccctttcctccaggttgtgggttcccttggtcatcgtcatccgcctctgccagaccgagggactgtttctcgtgagagtcaagtaactgctgaccctcagggaacccaaccgcagggctgtggggcgcgagggagccacaccctacagctcccgctccgtcatgagcggcgctctcatgaaaccgacccacatcattgggggtaggaaatgctttctttaaactattattctctgggttcttgtttctctgcttcattgttttagagtttacctttcatattaaagtatttacccaagtatgtggggactttttatttcttttctttgcaagaattatttttttaattacactatttgtaatagaaaagttgaaacatacacaaaagtaaaggtactattatgatcagtatgtattcagtattttggtcaatctttcttaatataattttgtatatctatatatagatatataggtacattattttgctagattattttaaagcaaatcttacatagcttgccttttcacccaacagtaatttggtatgcttcattaactttaatattttgattttacattaccaccatgtctttaataactcaacaatattcgttacattttaataatattttatacccagccaaaatttacatgtttcttattgttctaaatgttattttaattttgcttgcttgaattaggatgcaaagttcacacactgcatatttgtttacttatttttaaagagggagtcataatttggtactcctatgtcataaataaaaagtcaataggagtaattgagttactcgttttcaatattggcaatttgatgattatattccttttaaagtcgtataactatggttggatacattgagagagttcattttctcctactcatcagtgtgtgtatggatctctttagcaacatatccaaaaaattataatcacccttctgcttaaacaattccagggacaagaatttcaccatttccaaggatatcaaatatcacagtatttgatatgttgaatcattagactttgttctcatgtggaaaaaacataattccacatggaatacattgttactcttcaatgatatataggattatatatactgattctaccaattctacatgaaatatgacacattattttttaaatatgcagactttatgttttagagcagttttatgtatcaccttactcccctcttccagcatgcactgacatggtatatttgttacaattgatgaatcaatattggtacattgttgtaaaagcccacacttttcattggggttcactccttgtgttgtacattttatgggtttccacaaatgtacagttgcatgtatccattataacattgtcattaagtacagtttcaatgccttaaaatccctgcccattgcctgttcatccctccctccctttaataaaatccctggaaaccactgatgtttgaatgtcttttatgctttgccttttccaaaatatcatgtagttgaaatcacacagtatgttttattttcagattggcttttttgtttacttagcatggaaggtgcctctgtgactttcaatggcttaatagctcctttttatcactgaaaaataatttattgtgtggataaaacaaagttttttatccatttacctcttgaagaacatcttggttctgtctaatttgtggcaattaagaaaaagcagctataagcatttgtatgtaggtttttagctggtcatagtttttcatcttatctggataagtaccaaggaaggcacttgctggatcatattggtgagaactttgtatgaagttttttgtgagctttgtgtgaatctgccaaactaacttccaaggtggttgtacaagtttgcattcctaccagaaaagaaaaggaaacaaaacaaaacacaaacaaaaaacaaagaaaaatacccgagtgtttgctccatatgcatgtcttgtcaaaatttgatgttgacagtgttttgaagtttaggtattctaatgtgtaatgatatcttgttggtttaatttgtattttccatatgtatgacatatgatacagagcaacttctcatatgcttatttttcatctgtatcttttttgatgaggtgtttgttctgattattttccagatttttaattgaattgtttgtatttttattgccattgttgttgagtttcaatagttatttgtctattttggatatcagtcctttatctggtacatgttttgcaaagatttttctcccattctgagatttggtttttcattctctcaacagtatctttcacagagtagaaaattttatttttaatgtggtccaaatttacatttttttttcctttttatggatggtgcttttgtggttgcatcaaaaaacatttgccaaaaccagtcacttagattttctcccatgttatcttctagaagtttttttttttaattctacatctagattcatgaaccattttgagttaacttttatgaaaatcataatttttgtcttttgcttcatttatttgtatgtataagttcgatttttcttgtgccatttgttgaaaaggctatcctctctcttttcatttgcctttccctcttttgtaaaagattatttatttatatttgtatgggtctattttggggctccttattctgttcctctgaagtatatgcccagtttcttcaccagtgccacgtggttttgattacaattgctgtatagtaagtcttgaaatagggtaatgtcagtcatccaactttgctctttttcattgatattgtgttttctattctgagatttttgcctttccattgcaactcatttctctcttttttttggcagatattttaacatttaatgatattagttctattttcttaattgtcatacttatcatccatggaatattttattttattttattatttccataggttattaggggaacaagttgtgtttggcttatgagtaagttcataagtggtgatttgtgagattttggtgcatccatcacctgagcagtatacactgtaccctagttgtatgtagtcttttatccctggccgccttccccccttttcctcctgagtacccaaagtcgttgtgtcttttttttttcttttgagacagagtttccctcttgtcacccaaactggagtgcaatggcaccatcttggctgaccgcaacctttgtcctctgggttcaaatgattctcctgcctcagcctcctgagtggctgggattacaggcatgcaccaccacgactggctaattttgtatttttagtagagactgtgtctttccatgttggtcaggctggtcttgaactcccgacctcaggtgatccacccacctcgtcctcccaaagtgctgggattaccggcgggagctatggcacccagcctattgtgtcattgttatgccattgcatcctcatagcttagctcccatgtatgagtgagaatatatgatatttggttttccattcctgagttacttcacttgaataatagtctccaatttcatccaggtcactgagaatgtcattaattcgtttctttttctgcctaagtagtattctatcgaatatatatataccacagtttctttatgcactcattgattgttgggcatttgggttggctctgtttttgcaattgtgaattgtgctgctatatacatggatgggcaagtatctttttcatatagtgacttctttccctctgggtagatacccagtagtgggattgctggatcaaatggtagttttacttttagtcctttaagcaatctctccacgctgttttccacagtggttgtttgtttacattcccattagcagtgcagaagtgttccctattcacctcatccatgccaacatctactattttttgatttttttgattatggccattctaacagaagtaaggtgatatcacactgtgcttttgatttgtgtttccctgatcattagtgatgttgcacattctttcatatgtttgttggccatttgtatatcttcttttgagaattgtctattcatgtccttagcccactttttgatgggattgtttgcctttttcttgttgatttgtttgagttcattgtagaatctggatattagtcctctgtcaggtgtatagattgtaaagattttttcccattctgtgggttgtctgtttactttgctgactgtcccttttcccactcaaaagtttctagcaaccgcagttaaaaaagacaaagtggaacattatgtaatgataaaaggactagtccaacaagaaaatatcacaatcctagccatacatgcacctaacactggagctcccagatttgtaaaacgattactaatagacctaagaaatgagatagacagcaacacagtaatagcaggggacttcaatactccactgacagcactaggcaggtcattaagacagaaactcaagaaagaacaatggatttaaactacactccggaacaaatggacttaacacctatatacagagcattttatccaataaccgcagaatatacattcttttcaacagcatatggcactttctctaagataggtcatatgacaggccataaaacaagcctcaataaatttaataaaactgaaattataccaagcactctctcagaccacagtgtaataaagctggaaatcaactccaaaaggaacctttgaaactatgtaaatacatggaaattaaataaccttctcatgaatgaacattgggtcaaaaatgaaatcaggatggaaattaaaaaattatttgaacttaatgacaatagtgacacaacctatcaaaacctctggaacacagcaaaaatggcgctaagaggaaagtttatagccctaaacacctacataaaagactgtgaaagagcaaaaacagacactctaaagtcacacctcaaggaactagagaaacaagaacaaaccaaatccagcagaagaaaggaaataaccaagatcagagcagaactaaataaaattgaaatgaaaaatacaaaagataaatgaaacaaaaagctgattctttgaaaagataaataaaattggtagaccattagcaagattaaccaagaaaaaaagagagaaaatccaaataagctcaataagaaatgaaacagagatattacaactgacaccacagaaatacaaaacatcattccagactactatgaacacctttatgcgcataaactgaaaacctagaagagataaataaattcctggaaagatacaaccctcctagcttatatcatgaggaactagataccttgtacagaccaataacaagaagcgacattgaaatggtaattaaaaaattaccaacacgaaaaagtccaggaccagatggattcacagcagaattctatcagacattcaaggaagagttagtaccaattctactgatactattccacaagataaagagggaaccctccctgaattatcctgtgaagccagtatcatcctaataccaaaaccaggaaaggacataaccaaaaaaaacaaacaaacaaacaaacaaaaaaaactacaggctaaaattcctgatgaacatagatcctaaaatccttagcaaaatactaggtaatcaaatccaacaacataaaagacaatccaccatgataaagtgggtttcatagcagggatgcaaggatggtttaacatgtgcaagtcagtaaatgtgatacaccacataaacagcattaaaaacaaacatcatatgatgatttcatagatgcagaaaaaaattccacaaaatccagcatccctttgtgattaaaactctcagtaaaatcagaatacaagggagataccttaatgtaataaaagccatctatgacaaactcacagccaacaaaatactgaatggggaaaagtagaaagcattcccgctgagaactggaaaaacggaagaatgcccatggtatggggtaaatggtaagatttaccccaaactcaccagtaatggtatgatcttggtagaatcaggaacacttattacatcatgcattatatacattaatcagtagagtgtaagatgcacatttcttctatatttttggaatatcaattgcaacatcatgaactatcataaactagcacacacatttttttctcatataggttcagtgatgattactaagtagatataataatttggttattattagctcttctgagcaaatttgttaggaatagatccttaatttccatcttcaagcataatcatcttatcaatggcaaaacaacaacagtgaaactgactttacggagttggaatctaggttccagccaactgaagaccacaaccaattccaccctactctgctccatttagcacaaatacaatacatcgagtcctgtagaattgtgtgaaaaaaaatgagtagttttggagcagcctgcctctgtacctacctaccttagcaaatagcagtaaattaccacagattcattatcaatggtagtaaatggatccacagatccattcccattaatcacattctccccactgatttgctttacaaaggctaagagaaggtggagtctttgccatttgcagagattgagggactagtacataagtgattattcattttttgccttattactattgtagacagaaagacagtatgtgctttacaaatttagtagattgaaaacttgttaggtaaaaatccagttaattgtacactaaattaacacagctagttaaaactcagatgaagtccttttttgaagtcctcctaccttttgctatcctagttgttgtcttctctgtccttagctttttgttcatgcacttactgttacttacattatattgtatgataatttatcttcctatatagctttccctttcacgagacatttagttcctctaaaatatcaatatgtcacaacctagcacataaaaagtaaccagggcatattgaccagttttgagagaatgaataaatatgtatgttaaggatgatatctccagttctaataattaacattatcatttttcttcagttgtgggctatttatatgcatcaatgtggccaacttcttaattatacgtctgattgctttgggggataaatgctttctgtgtccctaattttacatatttggacctccaagggggtaattaatggcatcaactctattatcgtgtcacagataactggtgttcatgttaaattttctagaggagacttctaagagaaggtatatatatatatatatatactcatatatgcttttgaaatcacttaatgaagagagaacacgtttattatgagaattttccaaaactaataattagtgaaagataatggatgcaagtatgtacatatactacaagtatttgcaagaatctgaaattttgaatttcatagtatcagctcctcatcacaaactaagataaatatataagcatattctgtgtcttacccaaatgtgtgccaattgtacgtaaggtacaaaaacagttcttgtgcatggctatatttcctaatgctaataatctctgagaatctcaatagtaaaagtgtttattgtaagaccatcattatataaagaaaaacaaaaagaaacaaagaaaagaaaagtaagatacagaagccatccttgttatttgaaagaagaaacagaaataaatcaacaccaaatagttcatacgctgtaatattaaggaaagttgggacttgaatttaagtagacaaatatagtgtatttcactgttcctgaaaaaagagaaacagaatatgatctacatctactgcttgccatatgtctccacatttcccctgatttttggatagtaagctaaatctaataagaagagcacaaagaggtaaatgacaaaggtgagctaaagcatttggcagcatttaaacaacataatacaggctgtacttacatctgcctttgtgaagataaaaggatgttgtactggaaaaccattctaattttagtaactacctctataaaactgcaagcaaataatttgcaaacagcagatagttccatgatttgctctaggagcaactgtgtcttaagcaactgatttcctttttggttttcccttagctcgagaatcttaattgttacaactttatggggagtttggccctcagtagttaagatcatattcatgcttttttagtttgctctctcttaacacattaaaattgaccattaaattgtagacaacatgtgacttacaagccctttgaatgtataacttaatgcaagtattgtgttcttatcattttggtgtataataaatgacttcatatgctctatacttcataaataaaagtacctggctactgcacgtctccatctaggctaaagggaaacttgtatattcctttcttattcataacatgtaatacaacatcagaaaatgtgacataatgaaatcataaaaatagtcttagtgtaacaacatacacactaaatgcctcctcagcaagcattttagttattgctattttcattattagaatatttaaaatttagccatttctcaaactaatctgcagttttatatatatatatatatatactacagttccttgataattttatccatctttgaacttcaccatttcatatacacatatgccaaaattatgtatatacatatatgtacatatatgatacatagttatatataatttaacaaaaatataattttgaagtttgaaataagaagaggttaatatattttaaaataggtgggatcatcagatagatacatctacagatattcacataagcaaaatatctttcatagctattccaagacagttattatgttgtacagcttggatgtagaagtgtgtggcacaaaataaagagaacaaattatgagataagatacgtatttcattataaggataataattttattgtaaacttgctaatatgtattatactatagcaattacctaaatgtacatgtatgtcattaaaataactatgacattttaagcatttctattaaataacattccaaagttagagttaatgagtaatttacactaatcctataaatacagaataaatagtagtccatattaataaaaggatataatcaatattgttctctagatttgaataataaaatatgaacataagattgtcttccagtgaaacattcaaccttgtctctgcctctcctccaggaatttcatgtctctcctttcctatgaatactcaagatttttaaagactaagctatacacagccacctccttaatatcatatactgatagtagagagtaaatttatttggatcctgattcgccatattcactgaagttgaataaacatatatccatttagccaatggttctacttatagatggatttcatctgttcactttttttcttatattttttcctaacttttaaaacaagtttttggattgcaagctacttttggatgggtcttattaggatttgatcacaccatttatattaataacgtagcacatcaactgacacataatgagaactgaataaatgtaattcttttttattctgggcctaaatattgtttaaataagcagggaaaaactaaagttgaatttttaaaaataattctttggttttactgttatgataattttccacatgggataggctggtatttagctcctactcaggactggtcttctttgggcaagttttcacattagtttatcacttttgtaatcactatttatgcacaaagttgcaacgatattacgattgtctcttcagagtgagaattttgataaagtctaataaaaacccatacttcctctgagattttcagaaaatccactatgatattccctttatgcctgctggttctggatagtgtatttgacttagtatggccccagcagagactattatgagacttttatttgttgcttgtggaaaaagctcttttttgtgcacgatgatcagtatgtatatgagcccaagactgttgaagaaaatttgctaaagtaagaaataaaggaaagatgaaggatgcagagctcagagatctggagagaaagaaaagccttgggttcttattaaataatgtaactgaagcctggccagtctactgacttttaatttaccgaacttcataaattctctttttaattttagtcagttttatattttttcaaacaatcatgcccccttaattgtgaagtctgatccacgttatataatgtgttgaatatctcaaaatatggaaaatatgaatatacatcctccaaacttctgagttactgctacaattcccatttttttttaatgtgagtaaactcatccctggagtagttatatgaattttctcaaagtagttgttcactgttgaataccaaatttgacacaaaaacagtctccagtcttatataattttaatttttataagagagacaacctcatgaaaaacaccaatacacactttgtgttgtgtggattatgacgccaaaataatcactaccattctgaactctgtaatctccctcacctattaatttggctatttcttgcccaattttagacaatattctttcttcataaaatgatttcatatcagttagacctagatcctgctcattttcccaaaattttctttatttttattttgttttgttggtccagctacatcaatttttcattcaaaaatacatgtagacaaaattgtaactaaaaggtcatcaattttaatgactaatttggcaaaaactgatatcttacaaaaattgccttaagctccagagtctgcactagattgagaattagtgttagccaaggacactgctagagaggagatgggtgaatgggcactgagatgatggctaaggcccaaagcacactgttcttgccttactgccagggggatattgacaagcttgacaagaacaagtgcatggacaaaaacagaaggcagtggtgaaggcagcggtggctgctacatcagtaaagctcttggcttattattagtcggccagctgttaaactattttctttcaactctaaacctgatgatctataccctactttttgatgccagggatgggactttgcaaactgtctttcttctttgccagctggcttctccttaggttatgcaaatagagaacaatggagagagtttggagggacaggaggcaggaggagggacaggagctttctccttcctgtctgcattcttctcttgtcagtggctcttcagaagcactcttcactctggcagtggcagttggctttattatctagcttattttggtcttttcaatatcagccttactactccccttcagaagtctggactgtagctgtcagctcagaagtaagactcccagatgcataggacactctacgctgctgaggtgcagctatatcttggacaaacgtgcccaggggttattgatatgattcttatttcttgataacattttccatcaagttttaattctacttctagttgaacacatacacacacatacacacatgcatacataatacatacaggtgatcttcaaatatgtcactttgttcaatgtcatcttattataatgttgaagagaaaagaaattgattcccagctggagctacagtgtgtgtggagtttgcatgttcttcccatgtctgtgcaggtttgctctgcgtattctggcttcctcccactttccaaagatgtgcatatcaggttcattggagtgtgtacattgtgccataacaatgtaggatgagtgagtctgggtgtgggtgtgagggcacctgccatgggatggagttctgacctgcacttgttactgccttgcatcctgagctgtccagatacgctctggccacctgcgaccttgagctagaatacatgaataaatcatgatcttaatttgtatttatctgtcttaaatgtatgtacaggttacattcattttaatgtttaatattagtagtgttttgttatctatttagaagtgtatagatgtttttgtgactacaagtatgccaagggaacttagcccttgattatatcaattagcctatgaaaaaaattggttttgttatatgctgttttgcttgaaatcaaagttctcgtatctattgtagaggttgtgaggatttactatatatatatgtaaatatgatatattttgcataatatatgtattatataatataaactaaatatattaatataaactatataatatataaaattataaaatatattatatttcatataattttaattgtaatgcataattatatgaaatacaattataattaaatataacgtgtaaatattatatattatatacttctaataattatataatataaaatatattgtatatatgaatacaatatattttatgtatgtgtgcacatattaatacatgtattagtccattcaggctgccacaacaaaatagtttagattgggaagctcagatattacagaaatgtatttctcacagttctcgaggctagaaaatcctaggtaagttgccggcagatttgatgtctggtgagggccttcttgcttcatagatagaggtcttctcactgtaacctcacatggcagaagggacaaatgagttcccttggactctttatgaggactccatatccatgacctaatcttttccccgaaagccttcactccaaagatcatcacttcggggttaagattttaacatatgaattttgaggagaaagaagtattcagaatattcaagtaacatatgtatgtataaattcaaataaatatcatgtgcacacacacaatatatataaacatatatgtttatacatatatttatatataaatatatagacatatatataaatatatagacatatatatttatagatatagcatgttcatatttatttgaatttatatataaatataaactttattcacatttgaatatttacatttatttgttcatagtatttacttgaataatacttgaattcaattattttttatatgtgtacatatatatatagtgtgtgtgttcataatatttatttgaatttttttcatgctgtttagaccctctattatatttgaactaaggttaagaatcaatgtttttcagtttaatttgtagctatagtatacttaacatatagcccacaagaattttgaaccatagaagaacttaatatgttttcagaagttttcatggataagacaaataatatgacagaaatgagaaaatgcagccacaggaaattttcttaaacattgtattccaaagcatgaagaacatttctaatgatgacataggttatccagagaacggccaaagaaaattcaaactacaagataacatccacttactagccttctattttggaaattatattattatataaaccagtgccaagtaaaatagaattatatatattttattaggtacagttgtgtgagttttatttagactttccaacataattttataagttgcagtcatttttcaacctaaggaataatacaataaatacaactaaagttcttgaagggatagagttatcttatgaatagaatttatatgtatcattgtagacaaataaattaagctaatgatctagcattggactgatgaggggaattaaacgcaataatcaagggtgtagaattaatatgcagagttgctgtctatctgaaatgtctaagaggtaggatttgtgtcttttttatattccccatagcagtcttatatgtataaaacaaagcaatgacttcctctgtcgcaccagctgtatgtaccccttgatgttataaaagagattggcttatcatctaaggccctttcatgattaatgagagagggaaagaaaatgagctaatgatttaaaaataaaacggtggtttaaggtaaaaataaaattttacatcaggaaaaagggaatgaattgtcccaggggaatgaaataccaatgatttctcccactatactgagtattaaattcataaagacatacactgctggtcaggtgatatgctagttgctcaatggtttttactttcactggttaccatcttcagaagacacatggatatgacaaggataaatatggattcatacacacacgcactgataaaacttcagagtttattgaacataataattcagcagcacaactctgtcaacaactacatccaaaaagacacaagtaattttgtccaggctatcaagacatgaagagaatgtaagaaaaaaaaaaggaaaaacagaagtttccaaccaaccacacacacacacacacacacacacacacacacacacacacacacacaaacattctaccatcaaaagctttgaactagaactaggcagcgatttcctgattaatgggctgtgtaatgaaagagatgcttgagggtgaccttttccaatctatataacacgaactgtagtcacttaggtgccccacagaagtgttttcagggcaaaacgttttcagaaaaaaaaagtattctttatgaaagaactagactattgtctcggtaatttttaagagatactataccagttcattttaaatattatataattttaaataagtactaaaaatatgctatgttatttaatctttaaaaaaccataaactttatttttaaaagtttaaataataaaaaagggaaaaatatatgggaagaaatgtttgaattgcagatttacatgttcttatttttttcggtacagaatcaattgtattttacctttcttaagatgaagatagaaagggatgttgactgacatacaatagcaggtaatcagagatatccagaaaattttatcaataacaaaaattttgacaataagactttttttccaacaaaactattaagagtaattttacatttataggtaattttcaaactcctccatcatcaattatctatatcgcacctaacaccatggtcttctcaatgctccccaatgccacctacaggcacaaaaaacagacttaaaaaggacattaagaaattgatatgattagaaatcattcttattttaaagtttttttccttaattcttttgtatcagaaaaaaaagcaagtctttctttgtcatccattggctagaagccttcaaaattttgaaagcaaatacaatttctaagaatgccaggagaaaataaggctttgaatctatagagtaaataagaaagcgccacagcctactttctggaagtatgttctaggctgaattgcgtcctccaaatactgacattcaaatcccaaataactcataatgtgaccttgttttgaaatagggccattgtacatgtaattgtcaagtccattagtgtgagacttcagcccatgtgactagtgtccttataaatacaatgtttatagagagaatgccgcatgaacacaaagcagaaatcagggtaacgtgggtttttttttttttttttttttttttgacagagtcttgctctgtcgcccaggctggagtgcagtggcacgatctcagcttactgcagcctctgcctcctgggttccagagattctcctgcctcagcctcctgggtagctggcattacaggcgcacaccaccatgccccgctaatttctgtatttttagtagtgatggagtttcaccatgttgaccaggctgctttcgaacttctgacgtcaggtgatcaggccacctcggcctcccgaagtgctggaattacaggcgtgagccaccgtgcctggccagggtaatgtgtttaaaagccaaggaatgccaaactgccagcatatctcaaaaagcaaagaggaagaactggaacagattttttcctagtgcctttaaacagagaatggccctgccaacatcttgacctcaggcttctagcctccagaactgtgaaacaatacacttgtgttgcttaagccagtaaatttatcgtactttgtcacagcatccctaggcaaccaatacaaagtgtgatgtcatggaggtcacctgcctctgctgagtgcagacagcaagggttctcttttgatggcactaaaacacacacaaccttcatgccaatcatattcagtatcctgtggggcaagaaagctaagcgatcttaacatagtaagactaaatttaatattccatacccattagattagactttattagaaacaatgtaaaaataactaagtataaaaaacaaattcagagcataagtaggaattaaatcagtaatattaaattagtctgcttaagagaaaaaatgaacatagagtagtaacataaatgaaacagtatagtaacataaatgaaacaaagtatagtaacataaataaaacatagtttagtaacataaatgaagtatagtacagtaacaatttggacctcaagttattttattagctaaagaggatttatttctttttaattttaaatgtgtgatgtttaatgacaataaaaataacaataaaattaatagaaattgtatttgtattcaaaatccagccagacacttaaatcgcaaaaccagttcctctcctgttaaaaattgtttttgacactggtattccaccatatagtaaaacataaactgaaagttttgtatttatttttaaataaatataaggctgcttttaatttatttattaatgtggcatataaactgttttttaaaaaagattaaattacatagcaaatattggaaatggcttgctcttgtttaatagagctcagagtattttgcaaaattaaagtgttgaataaccccatgttctgggagtgtattacagtttcagagaagacagcatctttaatctgctgtggtgcggaaagtgcttcaattccacttggggactttaattcatacgtatgtcagcattgtcaattaatgctgacatttggtaacatgattataaatacgatttacatattctattattttttcattgttatcaatagaatagcttactattcaaattgttattttcctgtttttaagacaggaagaagcctcattgttatagtagcagatatttcagaaaaaaaaaataagactgcattatacacactcattgatctaattgatttttctttcagaaatgtaaaagtgtgaaaaatgtacatattagaaataagaaaatgtggcaataagaaaagaaacggtgtcttttcatgatagtttcttttttattacacattaagaaaaatcaaataggaaaagcttgaggaaaatctccaaaataaatacttggtgaactatttctctctccttggtccccaccacatattctttaattttatttactttttgttcctccagtcaaactcccgctgtgaggcaacaaataaactataagactatgaggaaagtgctatggaatatggtttgttggtccccaccaaaactcatgttgaaaattagtcccaatgtgataatgttagttagtggggcctagtgggagatttgtaagtaaaggaggctgatccctcatgaatgacttgatgctgttcttgcggtagtgaatgagttctcgctgttgcgagattggattatcttgggaatggatgagttcctgtgatagcgtgctgttacacagccaggacatccttcaaggttttccctcttcactcatctgcttcttttctgaccttctttcccatccagtgatgcagcatgaaagtccccgccagaacccagggtcatgcccttgatcttctcagcctgcagaactgcaagctaaataaacctcttttatttataaattacccagtctcagatattctttcatagcaacacaaaacggactaagacaggaagcaaacacaactgcatttttttaagcaacagtaaagtatttggagttttaacaagaaactgtggaatacttactttccttcttttgagatcctagatcacttttatcatttaaggtggggaacatgtagctccactttgtttcacttggttttcaaattctgtgtgtgtgtgtatgtgtgtgtgtgtgtttacatcagggaatatataagaaaacagtagtcgctctcaatgactcagaattatacaggcaatataattgtgagtttctttctagtattaacctattaccaaagaaacacagatttatctgtcttatttggaagggaaggtaaaaatatttgctacaaatacgtatctatatatttacatggcatcatactatctcagtcaatattattattatcatcatcatcatcattatttttacattaagtttcacttttgatgttgtacatattctgtgggtttggacaaatgtataatgacatgtatctgtcattacattgttatgcagagtattttcagtgctctaaaatttctttgtactctgcctaattattccttcttccccctcacctcctggtactcactgttctatttaccatagttttgactattccataatgtcatatctttggaatcataaatatgaagccttttcagattggcttccttcactaagtaacatgcatgtaagtttcctccatgttttttcattgcttgatagctcatttaattttagtgctgaataatatttcattattgacccattctgccacagtttatccattcacgtactgaaggacatcttgattgcttgtaagtttcggcaatcatgaataaagctgctagaaacatccatgtgcaggattttaggtgggcatacatttttaactcctttggataaataccaaggtccaatcatatggtaagagtgtatttagttttataagtaacttccaaactctcttccaaagtggttataacgtttcacatttttccagcaaagaacgattgttctttctgttctacatcctcactagcacttggtgttgtcactgtcttggatatggaccattctaataaacatggagtggtatctcattgttgtttgagtgtgcatttctccaatggtgtaaaatgttgagcatcttttcatatgcttatttaccacctgtatatctttggtgaggaatatttttaactaggaaatatatttacttcatttaatccaaaaatgtattaaaggatcttgggtagtttatttctaagagggacaaatgattatcacagaggagtacatgtgtgttctctctgtgtcattatggacaccaaatatggggttttgtgtccagtgcttctatcactaccactcctgggtctccacctcacttcttgaaagtatttgattacaaataacactgggttatttgactttctgctgaattggaatttttagtggaaacctccaaatggcagctcctagatcatatgcctagctcctagatgcaaaagagtctacaacaggtaattatgccttccatgttgggaaataggaatggaaatttgagacacattcagatttcaaaatgacattaaaaagaaaataggcttccacaagcatctgctgtctatccctttatatgtgcataactagctatgtcctacttccaatgaccaggccttttggttgttgattccatactgttcaggtctctgtcaagtattatttgtggttgacttgtctcttaactctctactattgtggatgtttctggtgcctcagtcttttagtttttattggacaggtcttgcaaaaggctacgcagtggtgacatcagcttccactcagttttgtagggtttcccagacagtgactttgaaggaaagactgacacattatcacatacaaaatattatcctgaaaatcctgaagtaatagtggaattatgttttagtgtataaaattatggaatgtgggttcctatcctcaaacagtctaactctaaaagaaacaacagaatatattagactgacaaaaatgaacagactctatacaaaatgattgggctattttagtaaagacattcttttgtagattttaatagacagtttataatttgtactcttgtagataattttattatctgtatttgcacctatttaacatgacactttaaaattactaaatactcaccaaaacaggaagtgtatctgtgcagtatattttaaggtctcttgtaggtcattctttcttgagtaaatagattctgagatctctaaaactactacatgtcattatattactaactgcaagtgatttcttagccattccactacagaaatgtgggttaaagaagaaaaatgctatagcctgttaaacattatttctataatgttatgttacattcaatatatatatttactatttatatctattgaatagatttaatataacatgacattatagaaatagttacagacatatatatatatatatatgtatatacacacacacacacacatacatatatgtaactcatagtaggcatatgttgtaagtagctttagaaatattttatgctttcagaacttgttgaccattaccttttagctacataatctagaaatacttttattgattttttaaaagtaatccatcatgatttgttgttcataaatttgattatacaaaagagcattagtgtcatgaattgaagttcagcattttggtgtttaaatctgcacagtttaaaatggactgttttcaaaaccaaagacatatttcagatgcattcctccccgaggaatgcatgactttgcatagcaatggatttataggagatcatggaataactaaaggctttaaacaactccttgtttttctttactaacttctggcattaaagacactcaatacatttaagatagtccctggtacttccgataatctcgtagcaagtttatttattcaaatttttagtgaaccctctccaacaaaatatagccgatcatatgttttaatgacttttaatggataatcattgattaataaaatgccttcaccacaatattatcaagactataaaaatgatttaagtatgaagaattgggaccagggagttgtaaaaatatatttttctatcaaaacaaggactgaaaaatttcttctttagttacatggatgtatcttaaaatacattcagctttactaataccaaacagatttactaaaactcacaccaatttctaacacacacacatgcccacacactcaaacaacactcatatcagatgaaaactgtgaaaaatgaaataaaccagtcatatttaagcatagtcaagtcaataagttagaaagagattattgctggaaaagcctgattcatgtttgatgattgatcatactgtcaacgaaacaagattatttgatcttccactgataactaacataacatgagcctatgtgtgtgtgtgtgtgtgtgtgtgtgtattacctaatattttcatgccaactttctgctcatttggcatgtataatcatatacaatgtagaagtaaaaaacctattttgcttttcattcaacataccgcaagttaatggtacatattagtaattttattaatttgttggtacaaattctgccaattcatgtttatagttgatatttctgttcaatactttttgtaactaaaatacaatttaatacaaaactaatttttgcatattttctgagtttcctttattggctaacctggaagcatagtcacaatactactatagagagtttgttattcataagatatattacacaaggaagtacttaataagaaagtttagcttctgaaatagttaaaagagagagctatctaaaaagtatgaggcaaagagatgaataaatatgtataatattttaatatatcaaatagatgggccactaataaaatcatgtattctgtatataagttgtaacgattttactaagaagggtaagtttttattttttaacatattggtctagtaaaacatctatttgaatttttatttattcattatgacacaatcaaaatattacaaatcacttagatatcttaaatatagcgtactttcaaaaacaaaaaggatgtctatatgccgttaataattagacaattctaacttatttctatttggttatcttgaagataagtttcattttctttattctaagaacatactggttcatttaactgcattctgttctatcaatcatgttgctgaaagtagtcattttcttatttcaattgcttctggaaatcatattttataaaaactcagatacatgtttcacatgagtattggtggtaagagtggttaataagcctgtcagttaggtaagcccaagtgatttggtctgcattaaaacaaacaaataggaagtttagaagcagtggtagcagcctttggttgtcttatttcttatttcttgattgctgttttatttctctctgtcagtaaatgacttccattctttcagcattctctatttcattactcaagtctctgttttctactttctctttccagtacccgaacagcagagaagacagtgttggaaaagctagcattgttattagtctaaatattttattgaacaagggctggtagaatattttgaaggagcacaagctataataaatcatggcatctaccaatgacagtttcaaatgaacacgttcattgggccagacaagtacatcactaagagtgttatttacctcaggtgctgacatatagtgccagatgttgaatttaaaccctgactcagtgattgtggctgaaaactgcattggcattttaaaaagcatctgttataaaccctgatctgagtaagacacaaaccacagaccttaatgcaggcaataacgaatgagagtttaaagtgattaccttggcaagttcagaaagcatgaaggctgaggtcaactcagagtatggaacatgttcctgttaaagggacgtttgtggggtcacttttctaagcactttcccacagaagtatgaaagatgtgtggataacttctaacttagcattaaatgatattttatgaatttgcaatatttttgcacgtgttttattttaaaagatacccttatgagtactgcagttggaccccgcaagaggaatttatgagttactgaatagtcataagagttgtacactgccagtgaggatcattttcaatagggtaacatgcatgtcattcgaagctgtatatgtagttttggaaaataacatataaagcctgatactaattatttacatcagcaaatagattgacattaaattaaaaaaatatagcagcagttctgttctagaaaatatataacaaaaagtaataaactaaaaaataattaagctttacataaataaatttgatttaatatgttgatatccatccactataactggcattttgtctttaattttaattaataattctgtacattttacacaaaaatatgttataaagaatactttttattttttatatttatcatagtttatattttgataaaaacattgaaattttgtaaatatgtaaaattttatttgattttgttattttagttactcagtagtaaaaaactcacatgaaaattttgattaagcaacctgttaatcaaattttgattaataaatcgataaaattagtcaaattattacttttatccaattaaaagcaataaaaaatttaattaagtataacatgattatgcatgtctttattttattgtttattcagacactgatagctcatcaactgaatggtctgatagccaaaataaaaatatgtaagtcatctttgccaatttcagcaatataaaagccatttatttaaatatatgtatatatttaatgtaatattacataatattttcaaggtagtagaacagaacatatgttatttaagtttgttaaaccagtttattgattttaaatatttagagtctatgagcctccatgttctcattttaggacctgaaagtgttaaggtgatcagaaccaaaccagcctattcacattttaacaatgtgacacttctatttcatgaggaaagataaacatgaatgaccttgcttttcacaatttcatgaaaaaatatgtttcactcctttagtggtcaaaaatagggatttcaatatctataaatcattactctatttttttatcttaatatcgtaatttagcttggacaactacaactccccccaagaacatagctgttggaaagggtgtgagcttataggcgacaagtaatcccactatatttccttgcttcagagattggttcaggggtgctcaaatgagctgtcagagccattgtgatgcaatgagattttgctgggactttgagagagtgacagtcctctccttccaagtatgcaaggagcactgggactaataaaacccactactgaatagcataaaaacctacataagcagccaacagagccaacagaaaatataaagcattaagacatgaaggaaaattaagtccttttgttattaatatgagagtctttataataatgagtttgaagccagctctattattcctggacttgccagtcatgttagcctttataatctgctttgtttttgcaaactcaaccatttcaattaatgcaatcatagaggagagaactatgaaagagagacttttacagtgcttttctaaatcccttaaccactctttcccccaactaggggtacaagtgagttatccaaggggatggtaggtaaaggttactgctgatgttcagtagaatcagttggttctggctccctctccctctttctgtctctccattttgcccattgaaattggtaagaaggactggactagatcttaagaagtaggaatatacattatggcccaatgtactggccctctggattttcagtaggtacatctgctagtaagtgaacacttcagtctatagtgcacaggaacactgagagagccacatttcagcactggattcaaactacaatcactaaaatcattaaaataaaaaaaaaaaaacctttgtaggactgagattaattggagagttttacaaagagtgggaagatctttgggttaacatttgaattaggacctgcatggtcaaaagttaaccaccatgtaacaatgaggattaagaatacgtcagaggaaatagtgccacaactctaaggttgaagtgaccttggtgatatagtttggccatgtccccacccaaatctcatcttgaattgtagctcccataattctctcttattgtaggagggacacagtgggagataattgaatcacaggggcagtttttcccatagggttcttgtggtagtgaataagtctcacgaggtctgatggtttcaaaagcgaaatccctttcacttgactctcattttctcttgcctgctaccatgtaaggcgtacctttcaccttctgccataattgtgaggcctcctcagtcacacggaactgtgagtccattaaacctttttcttttgtaaattgcccagtctcaagtatatctttatcagtgaaaacggactaatacacttgacatacttgaagaaggcatagaatgccatgctggctggaactgtagatgagcagctagtaataaagaatgagatcagaaagattgaaggggctcagatatttttttttttttcaattgactgtcatgtccctgtgggccaaatgcatcaatcagaagcctggaggaaacaaagtattcgtattctgaactgaatctacaattagaatacttcttatcaatgggtatcaaaggaacagttctacttcagcattcaatagacattgcaaataataatacatatagggttgtgtggacttacaaaaatggtacaggaagagggatacataagaaagagagtagtacctgtcttcatccttttgggctgtggtaacaaaataccacaaactgggtaattaataagcaatttattcctcacggttctggaggctggaggtccaagatcaaagtgctaacagattcagtgcctggtgagggctcactttctggttcatagatggtaacttctagctgtgttctcacatggtggaaagggctagatacattccaagggtttcttttataaggacaccaattccattcatgagcattcttccctcatgacccaatcatttcccaaatgcctcacctcctagtatcatcatatcaggtgatttggttttaacatattaattttgggggtacactagtattcagaccatagtagtatccatgactcttcctgatgagggaagcaaatattttgtttcaaacactctagtcatgaagctcctttcctgcccaatacagtgtaatataacatgtttcaaagctgcatttcaggcaccagagaatcagaatagaagatgtcaatcacccgaatgcagggcactcagatcactgacatagaacagagtacaagtgttaggcaaccaattgacagttgcctaaagaaaatacataatttacaaaagttgcctttggaaataatctacaaaatcacaatggtttaactcaacagaggtttatttctttcttacttgaaataaaaattgttattcttgatgagcaagaagtacttctccaagcagtaattcaggtaccccaagtttttctcacctttagttccattgtctttagcgtctagattttaataattctgtgcttatctgtatcaagcaagaggaggaaagaactaggagatttgctggcgacatgtttctgcagactgggccttagcgtggcacacattgcaacatgcatgttgtacatccccacgtaattgagactgagaatgtggtatagctatgcttccagaaagagcaggtaaagggtttggaggtgaacacattgtagatgactacagactatccttctggtcaggaaatatgctttacagaaaaagctaatggaccaaaacattattactgactctagcaactcttcctactcctcttgtaaaactgaaattgatcaaagagtgtctgttaaactgtggccctagttttgcagttgctgaatgctgtcccatgtctaatgcaatctaaatttctcacatctgacaacattttgaatagtgagaaattattgaaataaaactcagtctatctgacctttcccagtttaagctctaaattctttggaatactttctgtctacagaatagtcctcttggactgtcctcgcattgcaatgttttaatacaagcttaatggcttcttttccccatagattatactttttttgtgtctgtttccacatatggctgcacttgccatgagtgtttgggagactaagagcttttgttttattttgtttttttcctaacaccccaaaagctaaagatatttatagtttaagtttgtgtaatttttggacaggcaattttcttgattattaggattctcatttttgcttctaatcagaccatgtaagagggatatacccacaatttgccttagatataacttccaagcctgctttatttccgaagccatatctcatggtttctcattttaatggcagctaacttaagactacccgtgacattagtttgtgagtaggcagaggtactctattaatctgatctttgcaacagacctgagtcctcatcatcctctcctcctccagtttcttttcagagttatctcttactgtttggtatctaaaggcatttccttttccaaaggcttcattgctcaaaatctctagatgtttgttatgcctttctctctttttctagcaaaacagccaattatttattgaaatagtcactccacacaatgccttcctaaaaaaggacaaattaaatatcaacaccattactcttttataaaccattttcctcataactaaagtagtggctgtcagtgtttcggttgtcttaacgctaaacaatttttcatattttagaaatgtattgcagcctgactaccctcctggggcaaatttgatattacatgtataaaccttacagctgaaaatttaataataataaaaaaaaacctgagtggcttattcatctgaaggccaaatggaactgcttgatcaagagatccaggtcctgatgtttttctttctttcttttctttttttttttcttttctttcttttttttatttttttgagaccgagtctcgctctgtcgtccaggcaggggtgtaatcgcatgatcttggctcactgcaacctttgcctcccggattcaagtgattctccaaccttagcctcctgagtagctgggactacaggcactcgccatcatgcccagctaatttttgtatttttgtagagatggggtttcaccatgttttgaactaattcaattttaggctccaaatttgtatgtatcaaattagaagcagtaaagtacatggcagataactctgtcaggtaattggttatggacacatgtatctataagggaggcttagaattatagttctagccgtaagtcccaaaagtgcaaataggttttggtgaacacatagcagcctctgcacgttggagaaaatatcagttttgagcatgtacatatgcatagactaataagtttctattaagagtcctaaattctctcagagggccaatatctcacaaaaggcttttattagacatgtgcttcctctacacagagtaaatgtacttgaatttaaagtgtctgtagagattgttgagtaatctaaaatttgcctgtttacattgccatatttagagaaatccaagttcagtgagatgaataggaaagatatgctcaagttactgtacttcaaatgtatactgatcttctttcacttgttttcatctaagcctacatttgtcttcttagagttctaaggtaaggaaccagaattactctcagtaatgttgaaagtgagatttaatagtgtggtatggatagttgcaataggaaaagacttttaagtaatgaggaaaaaatgtcaggtaagactcaacttctcctttttctcatattacataatcaaggaaaggtttaatatcagctggatcagaaattcagtaatactcactttcagaagaaagtggtatattgccatgtgatgcattcaaactgcataactttcaggattcacgcagtaggaactaagaataagactacagaatagtgaaagtatcattcacaaacaaaatgctgagtaatttggaaagacaaatatgtctataactagtacagtctgacaagggctgttatgatatacaggtatagatcaattagaaagagcataaagaaagaagaagggctacaacatcaaaaatagcacatatattttcctcagagttaaagagccgtagaggtaatcaacattgcatgatagacaatccctgatagtacttgtagtttgtgtgcgcatttcattcaaactttggtttctgatattcctaatatgtgaagccacattttagcctaaaaataaaaagaatcactgaatatatttaaaggaaatagaaatgcctaattatgtttgtacctaaaatgttggggcccaaagtaataagatgaattatacaacaaccttatttaatgaagattcagtagcaatttcttatttttggtgttgctgaatattctgttttcactcccccaaagttagaggacatagtagcactctccttttgcttccttattaaaaagataaattactatctcatcccacagagaatattgtaactaactttattttttaaatcatcaaatacatctcaaatcataataagtgtagtgcatataagaggcagtaaaatgctgagctgccttaaactattacattttaaactcatagaaactctgaaatattctaaattattatgccaaaaatcatgccaattaatcagtataattggatagcctcaattaagaaaaataaaattatagaaaacacagaaaattagaaataactgtaagtattctttcttgaagtggagaaaacttctcattagatatttatactattctagactctgttgacattattacttattattgaagaaaatctcagaaatagacatgttttattttaacagcagtaaaatgcagaaataaagaatgtaatagatttatttcattttccaagtggcttcatctcaagacaattcagcatcatgtaaatgtaacagtaatatgccttttcccaaaacacactgagtcttcttatctctaaaactgattcctttaaacttttaaagttttcactctaagacaagatgattaagggtaaagcgatattaatgcttcttggaaacgatcgtatcactttccctgaccttcaaattacatatatcatttgtctttggcaaaactacaccattgctcaatgttgtggacagcaaaattaatctggcattattaataacatcagcaatgaaataaaaagttaactgagcttacattttttataaccccaggagttttaaaaccatgttaagagctttagtgtgatgacagaaaatttgtgctgtggcataaatgatatgacaagtcaaacaaaacatatcattgaaaagactatattaattcagcaatatttttattgtattttgaatacattttatactacggttaggaaaaaaaaaaacaactccagctgtttttcctctgctctcacatcacagcaatcaacataagacttatatgacaagatgtgtagggatctctccctaccagcaagcaagcaatcaattattcagccaacaccagcttgctgtcctccatttgtcttctgactatttctctggggatagcatcagattccacaggcccagtcgcacaagactgcccccacttccaatgtcaatcacaagccccaggttgtttaacttgtgcttctaaccaaccgcctgtaaattggtattcccacaaccccctccttgggtttgataaacttgttagagcagcttactgaactccaggaaacgggtttattacaaaagatattccaaagggtgcagatgaagagatgcatagggaaaggtatgagggaaggctcacaaagcttcaatgttctctccggccttgctatcttccaggaacctccacatgttccgttttctggaagctcttcaaactctttcctcttgggccttctatggaaatttcattgaataggcatgactgaagcatgaacaactgtgtacaaatgcaattggacaaaggggtataatctaatagtcacagactgagtgggaaaatccagcaaggtctgtcggtggagatttcatcttggcctctgtgcagcattcctttctccatggtatggcacaggaccgcctctgaaatgcagctcatatgacctatgatcaaacaaggtaggttagagaaatttttgtatggccagctccaaggtacaaaggtaggggaagatttctaccctttggagaaaaaggagcaggtaaaaggaggactggagaaagtcagaaagagaaattctgttttctgaggcctgcttctggggcccaaagtgccccaacattataagaaaagactaatgagagctttgagagtcatgagccaggatgtgtggatagaaacatatttaaatattctccatctcctaatataacgatgtgaaaagggaaataaattggaaccacaagaaatagtggcaaaggtttggaaagcttaagtcaaaatgtgttgttcataaatacggtctgaataatttgaacattttctgttaatggtatttgttcaactataatgatattttccagccaagatataattggcaatgtcaaagtcacacacagatgggtaaaatggccaatgtctctggaaaatcttgataataactttttagtatctctggtgcaaggtcacttaaattcagaaaatagcacccaaggaaaaaatagccatattcaaaaaaataagctccatatatttagatgtagatataaatttggggtgatttatttcttattagacactaatattttttaaaacagagaatgacaaataaggaaattttgcagttaactatgtcctaatgaaaaagggtagtagttttacaagaaagatataattcatcaaaaaggcagggaagcattcagactaaacattgagtatgtttggaaataataaaaattattgtttcttttaccaacatcaacaatcttttcaaattaatttataaaactgtcatctctgttcactaattttgaattactcatattatttttaattttgaatacttataatattacttactaatttttaattaattttgatatacctatatcactgttttgaattgatctatgaatgatctagaaatgactttgcctgtttttttttttgactcatgggtatttacttttcattaggtaattttaatgtattgttaactagaaaaataagatgaagaaaaaaacattttaaatgcaaaatataaatttaaagaacttcaaaagaataaaatttcagttttatgtctttcaagtaaatttgctgttttcaaaattattttttgttacaaacctattttatttcaaaaaatatgctattgtttttaacctataatttttaaatatctgacagcattgtaggacttaaagctattaaatatataaagatataatagaacttattggaaatattcaaggaaaaactaacatattctttaaaaacattttaatttttaaattctatgttaattgactttttgatacatattttacttttccttcacttcttttgtcaattcttaaaaatgtctttcttcataatttttggcaattagtttttacactttaatagcaaacattgccataaaagtgaaattaagcattaattaattttatgtctgcaggcagagtgatttccttagggaatcaattttaatagagagaactatgtttgtacctggcaggatattcacagaaataaaatatttattggccatctactttgtttaagacctcttaacaaaccataacttattaaagcataaagtaacatacatagtaaatacttttaaaatctgtaaacaactaattcctttcttcttgtgaagtcttgtttagatcattaaagtaatagcagattttctcacaacaggtttgtgaatattgtctgtttaacatgaaaactataaaaaaattaaagacaattgatatatatttattcaactatgtcaactcaaagatgatctgcaattgttttctgaataacttattaataatgcttaggcccctttgttgaacatgcttttatttgtgtaaataagaattcatttaaaaatacattgtacaacttcaacacattgtgtgtccctgaaggtactctgagattttgcagttatagtataaatgagacaaaacggcagagaaaatattccccatgtgtaattctttctacatttatttcccacatcaatctcacaagtgtttttatttcacactgattgatatcattgagcacatacctcaatatctattatcacaaaaactatcattatcaacaaggactttaaaaaatatctaaacattattatctgggtagcaactctatactccattttatccattaattttgtctaattagtaaagaagtacttatggtaaaaacaaattaaaaatagtacagaaaacatactcctgtatgcaattattacaaatattttatttagttcctataaagtatttacatagctgagatcactatataatattatactcatgttactttatgtcctaactttatatcagaaaaagcttcccatactaataaatgtaaactactgtcaaagaatctatgatacctactcaataatgtttacatgaataaatatgatttatgtaagcattatcttgcagatggacactttatttcttcccaaacttcatagagtaattttaatgctacagtaatgacgtacatacaattgacccttgaacaatgcaaagcttagggaggcttaacctaacacagttgaaaatccgtgtatacattttaactctccaaacacttaactagtagtagtcaactgttgaccagaagccctaccgataatattaacagttaatacatactttgtatgttatatgcattatatactgcattcataaataaagtaaactagagaaaagaaaatgttattaagaaaatcataagaaggagaaaatacatttactcttcattaacttgaagtggatcatcataaaggtcatcatccttgttggtcatagcttcacactgagtgagctaagtaggagaaagggatagaggaagggttggttttgctgtagctggggtggcagaagctgaagaaaattcatggataactggacccttgaagttcaaatctgtgttgttcaagggtcagctgtatataaattttattttcattacttggaatttggtaagattggcttaccaggaggataattactaaattaatttttataaatctttaaaagttgttaacatatgttgccaaatcactttccagaaaattacaccaacttactctaacaacaatatatgagggttataatgtctttatcgggactggatatatgttattgaaaatacaaaacacatgtttaattatttctgacactgtggcattcattattgctaatatgaaataccagtataatacatacctacatctatatgtctacatcaaattccattatttgtgaattccatatttgcaacttctccaagatgtattaaatttatgtgttatctcaaaaatccatactcactcatactttcccggtctttttttttaacatgcacagaataaaaaaatttgattttctcaatgtgcatgcccccagttgaggttaaacaaagtaatactctactttgttatttcatttttcatgctataaacaaggatctttttcacagtctatttggtgctctttgttggtgatatggctgtttaaaatgcctcccacaccccagaatattgctaaagctctgtctattgttcccaagcacaagaaggctatgatgtgtcttacagagaaaaatatagtcaacttcatttgatgcaggagattggttccagaaatcctgggaatacccatatctggggatgctcaagtttcttatataaaatggcacagtatttgcatactaggtatgcaaatcctcctatatacttcaaataatctgcaggttacttacaataagtaatacagtgcaaatgctatataagtagttgttataccatatttttaattgtattatttttcttgttgtattgttgtttttaccctaatattttcaatacacaataggttgaattcacagatgtgggacctgcaaaggtttgatgttatgtgtgttaggtaaggtttgttcaggcatgcgttttagtgctgttggctgatgagagttcaatgttaataaatcagcaatatatcttaagtaaggtgtctcaaaacagaagcacacatcaaacaagattacatattgattagctgatgaaaatgttgtgaccagaggctcacaacaaactaaccccgtatttcctttgcaagcaatgatttaatatttgctaatttcttgtttgccacaactttatagaacataaatactgcaaataacaaaatttgactattgctatctatccatatataaacctagtctgcaaaaataaaggggatattactcaagaacttaaaagaaaaagaaacctgaaaaacagaatggtatgcagatgatgacgttttacctaccgtggacacagtaggaacaaagcagcttatgtattagcatctatgtcacaggaaataagactctggattttgcaagatgatggactataaataagaatcctggataaacacagtactaaactgcacacaggaatgaggagccagaatgagtccatccaccagcaagtataaaaaataaagaaatacgtctccttccgccgggcgcggtggctcacgcctgtaatcccagcactttgggaggccgaggcgggcggatcacgaggtcaggagatcgaaaccatcctggctaacacggtgaaaccccgtctctactaaaaatacaaaaaattagccgggcgtggtggcgggcacctgtagtcccagctacttgggaggctgaggcaagagaatggcttgaatccgggatgcggagcttgcagtgagccgagatcgcgccactgcactccagcctgggcgacagagtgagactccgtcaaaaaaaaaaaaaaaaaaaaaaaaaagaaatacgtctccttcaaacttgattgaaaatgacttaataataacaacaacagtaaggctctctgataattaatgaactttggtctatcataacccagtgttcaaatttacattgccttcaaagacagggtaactccagcctagacatttatggtaacatggtacatagcctgaagcatctgagagcaatagaagcaaaacctctttggtgtaaacacccaaaatacaggttcaaaacattcccatgaacaaagccgtataacataaacacattgaaagacattggattaccaattaactataagaataagaagaaatataaatagcacaattatatccaaaacattcatataacaaaattatatatatataaatttatttaaataagcataattattaaagaagatatttaaaatacgaccaagtacaagcatggcttaaaaataaaaacattaaaatcttaaagataaaaaagttattgaactgtaagctagatatggaaaaaaattcagaaaaaaattaaaaagtgaagcaaaggttgacaaatatggaagccataaacctatgcactatcatttgttcacgtagatctctaaaagggaaagaaaacaagcatagagttatgaggcaatatttcaaaagttaactatttaggatattcccaacttcgtaaggagatttggcttatttttaaaaaagcacaattccaagcataacaacacgaaacagtcatattcttctatactgaaagcacattgagatacttggtaaaactgcggaacactgaagaaaaaaaggtctcttaaaattcaccagaagtaaaagacataattataaaaagatgatacatagacagaaagatagattctcgacaagatcatgaagatcatggaataaaaaatgaataggggccaggcgtggtggctcatgcctgtaatcccaacactttgggaggccaaggtgggcagatcgcctgaggtcaggagttcgagaccagcctggctgacatggtgaaaccctgtctctaccaaaaacacaaaacctagccaggagtcatggtagatgtttgtaatccctgctacttggaaggctgaggtacgagaatcgcttgaaccgaggaggtggaagtttcagtgagccgagattatgccactgcactccagcctgggcaacagagcaagactccataccccccaaaaaagaaaaagtatatatatacacacacacatatttatatgtacacacatacacacacacacacacacacacacatatatatatggcacagcaagtttttatgacagtaatgaaaaaggtaaacataagtcaaaagaaagctggtgaatattaataactgtcagacacaattagaagtacttcaaaaattttaaatgataaagatttctgcactggaacaacaatttgtcaagaacatattccaaataataaggaacctaataataagatctcaaagatatttttaaaatataattgtcaaatattaatttacatattaatgtaattggctaagctactacatttcttggatatttaaacacagttggtcagtcatttatatatttggtaaacaaaatgagaaaaaaatagattatttaggaaacaaaatttacaacctgatgatgtatacagctgaaactttgtactcaaaccgttaatcttttaaagtatagtgagattacagagtctgcaaccaagttagaaaattggatttaatgataagactgcctgctgctgtgatcccagtgtacagtgaaatattgagtgtggaccactaacaataggagctttgtacctgtaaagagcctctaaaagtcggatgtcccactgcaaagctctacctgctatgccaggaatcgattatgagtagcatctaatttttttgttcccagataaaataccatctggatgcctctgatggcagagtttaagttgcatgtccctgccttggcccaaattacgttctactttctgcctttaggaggcaggatttctattagaagatgattcttcctggatctatctatctatcattgatctatctatccacctacctatctatctatatttttctaatgttcccacaaggtcctaacattctaagcaacaaaatcagcattctataaaggcagaacatatcctttctgcctgaaacatttgctctttatattttgcaggcattaaacttggagctaatattttatgatagagccaatactgatctcattcaaagagtaatgctaccttctcatctcttctgttgccagatgctcatgtcctgggatagagacaagtctcccaatccctaagaaacgatttgcttacattccatagtaaaaataattgctccctcttttttcagaggggaagggggcagatatttccatacctatataaactctgagattaataatttcagagttccactccttgtgatgtcactgcattgtatatacaggtgtaaccatttggttcttagtattactctgtgcagtgttggctgctcttattgttgagaattataaagatccaacctgattcagaggatatatatcaaatgggtaacatctcagatgcttctcaatttctgactgaacaattttagtttcataaccagaatatttctcaaattatgagaaattattaaaaagtcctccctccctccctgcctgccttccttccttccttgatggagtctcgctctgtcacaaggctggagtgcagtggtgcgatcttggctcactgcaacctccgcctcccgggttcaagcaattctcctgcctcagcctccagagcacctggaatacaggcacacgccagccgccacgcccggctaatttcttttgtattttagtagaaacgaggtttcaccgtgttgcccagactggtctcgaactcctgagcccaggcagagaaagcatttgatacaattcaaccagttttaataaaaattattgtcaaaccataaatagagatcaaattctggaatggatgaaatgtatacaccaaattctacaataatctaattctaaatgttggaacattagaataattcttaaaacaggaacaaaatcaatgcttctatgcaacaatatagtggtggtcttattcaaaagagacaaaggtgtaagaatacaaaagaaaacagcaaacttttcattattatgaataatataattctctccttagatgattccatttcatctacaaataaaatgttagaataaataagtttattaagttatttcaatgtaaaattaatatgaaaaatttaattacatttttgtatgccagaagcaattagaaaacaagtattttatataggactatttataacatggaccaagactatagaatacccagcaatacaagtaactaatatgtgtaagactactggagagaaaataattttaaaattatttatagatatttaaagatgatcataattgagattaatatgttcgaaaggagaagaaaattcattttttaaattaatttataaaatttatgagattttagttaaagctcagcaggatgaagcttcccaattaattaaaaaatgtgttttgaaaagcaaaaggaaaacaatagaaaaaatattttaagctacaaaagttgagtgagataatctagttgtggatatacaataaatttatagtaattaaaaagtataatatgagtgtgaaataagcaattgatctagcaaacagaatatatggtgtattgaaagaagtacaaatatataacaaccagatatatgacacaggtggcattgaaaattaatgggaaaacaataaactgtgcaaaaacaaccattatccatgtgatagccatgtccatatcgatacatatgtgatatccagatccttatatgtgacatccagatccagatccacatatacagtgcatctgtatatgcactgtgcaaaaaaaataaaaaataaaaaagctgttccggttatcctaaagcttttatttgttcatttatcatatcaattggaactcttttgaaaatgacaagatgtacttactagatagaattccagaacaagaggattaaactgagccttatctgggcaaattgtgaatttagtcttaagtgcaaaaagtgtggaaaacttcttaatctaagaaaaacttaattgagcattgtgtgtttagtctctcatttaatccccatgaaaatcctatggtctagatattactattatccttattctattacctttttcaagtgttggatagaagatttctagttaggaagaagaaattgctgtcttgataattggtgggataaaagtccaaaatatttacaatatgaaactaagcttatgttttattgaaaagctcataatatgcctaaaaaactgatcttaattaattttaatttctctttattcccttggagagaataacatgcttaaaggcttcacttatttttttttggaatatgtcatataattatcaatgtatgatgtttctcctattcgttcatatattaagtgatactattacaataaactaaggaaagtatctgcctaaaaacaagagatccagatggagggagaattccaagagactttttgggaccaattaagtacactggtaaatactgtgcatattttacgctagctgttagaaaatgtaaatggagacctgattatcattccaactgagaacattacataattgctccattgactgtactaactttcaggatgttcacgttcaatttaaggcatgcattatcctgacataaagttctttgtggcttctatcctggcattgtaatggactttttcttacaaatgattaaattactcatatttttagtgagcatttaaggtcactagagtccatttgaggaatattctcattcaaatataccagtgactcacttttagaaaggaacaattcattcatttatgaatcaacctggatccaatgctctgatattttaaaagggaccaatgttaattattgaagagtagatttcatattcataaatattttattaatatgcctttatgaaatggttgtaagtccaattctgatcaagatcatctgtgtatttttccctgttttaaaatattgaatcaacgacttgaagagttatttatttgaaagagaatagagacgataaatttaacattttagaaagtaacctattatttaaatggattttagatatttgaagggtgatattgctctgtaattagaaaactgaagaagcagatatttcaaaacaatatgaacttaattggaaaagacagcattttaaactccacatgaaaagccatcctgtttctcaacctaactaatatgtgtttcagtgagatagatgctactttctttttcttttactttcttatcatactaataattttttaaaatttgatgtaagtggctgggcgctgtggctcacgcctgtaatcccagcattttgggaggccgaggtgggtggatctacctgaggtcaggagtttgagaccagcctggcccaccaggtgaaaccccgtctctactaaaaatacacaaatattagctgggtgtggtggtgcatgcctgtaatcccaactacttgggaggctgaggcaagataatcacttgaacccgggaggcgggggttgcagtgagtcaagatcgcgccactgcactccagcttgggctacagagggagactccatctaaaaaaaaaaaattgatgtaatgtgtacaggaaatgcatacaactcttaggataaaatagagatagacagcagaaaaactctgtcttgacaagaatggatgcattcagggcagtatggccacagatgaaactcgtcttagattgtgtagtgtccatttcaactctgcagacagtaaagcaaaaccagacatgtttattcttaacatgggacttgatgagaatccttctcaataacaagaagacataacctgcaaatgcatgttgtatgcagaaaagatctttaggcgacactgaaataaataaatgaaatgtaaaatgtgagagacctttttgaattcacatttaattttatattatacttaatagagacatatatttctattaatgaatcatttttgtgatttcattagtatcatgaagcgtatttcccatctcaacaaaaggcaaaatgattcagaatttgattaggcaaatgttatggcccctgtagctattcatagacctctcaagggaatgggtagataaaaatgaaaatacctcctagaaagagtggtgccaaaaatctccaagggttgtgtcaaagaaagtgaacagggccaggtttggtggctcacgcctgtaatcctagcactttggaaagccgaggcgggcagatcacgaggccaagagttcgagaccagcctggccaacatggtgaaacccctgctctactaaaaacacaaaaattagctgggtgtggtggtgggtgcctgtagtcccagctattcggaggctcaggcaggagaattgcttgaacccgggaggtggaggttgcagtgagccgaggtcacgccactgcactccagcctgggcgacagagcaagactccgtctcaaaaatacatacatacatacatacatacatacatacatacatacatacatacgaaagtgaatacatgaaaaaagtaaggcgaatatagaaagtggagtgagagaaaggctgggcaaattgcatcctatgtttcattagtaaatttaagacatagcaccagacggtactagattatctgattgttcaaacactgtaagcacacatgtacaaacaacataaaaccaagacttatcttctggttttgggaatcatttattttgttttagatttattcctccttcactttcctcccattcctctcctttcctcttcttctccctccccttcaaattcttttcttcttcttcttcttcctgttcatttccttctttgtctctttctccttcttttctgtctatatctacctacatgttgttaatttacatataatatgtattgctattttctccttgaaactgatttttatccatgcattttatagcccttagcttggggataaaatgaaaacaataagaaatattgaaatcctcttgaaatattacaatgcatgtctgatgtgttcccaatgtcctgaatagtgcctggctcatagcaattgttcaataattgtttgctgagtgaaggaattattttgcttgcttctactcttgttcttctaaaatcttcccatcaacaagttacaaaagttttgaaagatgtcttgagtcagaacatacaatatttgctccataagtacttgaagaaaataaatactgtaagatgaccatctcacttttatattgaaacagatgattgaataaagatgtggtatatatacaccatggaatactattctgccataaaaaagaatgaaatcatgtcttgtgcagcaacacggatggagccagtggctgttatattaagtgacacaactcagaaacagcaagtcaaataccacacgttcttagtgatatgtgggagataaatgatgtgtacacatgaacatagagtgtggaattgtaacactgaacacttggaagggtgggaaggtggtgacggatgagaaattatttaatgggtataatgtacataattcaggtgatggatacatcgaaagtccagactttaccactatccaatatatccaggtaacaaaactgcacttgttccccttaaacttacacaaattaaaaaataaaatcttacatggcttctcattgtcccatcttctgcaagcccaagaatgtcctacaaggtctctctgcagccggtctgtccaacctcatcagtttcctcattgtttatttgctggaacctacataatgtttctgtctgtctcaaacctgtcaatttgtgttctgtccccaaagcctatcaatttcatattttaccccactataatgatcttccttactattagctagctgtctcctttacatcattcgagattgttttttcatcccttcctcagagaagacattaatgaccaccttaacactggcctcttcaaaggaattatctctgatgaattcatgttatttaaatacctgtttatctttttctccaacagaatgtaaactctatatgtgtaggttaacttatcacccaggtccctgcttattagttcttaataaaaatttgctgatttgcataattattccatctgtattgtttttcagaaaaatgagtaggtcttttcaagtccaattctttcccttgatacctgaatatcttctacacttgagttctcagagacctgacactttcaaagacctattctttctattataccatattccatttttatgtagtttttattatacagttgtactctagaactgtactgttcaataaggcagacactagccacatgaagtgatgtaaaatcaaattaaaattaaattaaattaactaaaatgaaataaaattaaaaattcagttcctctggtgaggtagcctcattataagtgctcagaagttacaccactctccagatttggaacttgtatttgtgtttttgcatcagatattatttttatgagaaagaaaaggttgcaatggactgaatgtttgtgccctccaaaaattcatatgttgaaatcctaaccctcaaggtattaggagaagggactttttggacatgattaagtcatgaaggtggaaccctcatgaatgggaataaggtccttatgattctcctaccaggtgaagacacggtcagaagaatcatctttgaaccagaaagctggacctcaccagacactgaatctggcggtgccttcatcttgaactttccagcctccaaataggtgaaaaataaatttctgttgtttataagctattctgtttaaattatttgattattgcagcccaaatagatgaagccaaaaagttatattagcccctttcgtttggagaaaaaattatattatcgttgttgtatttgttattctatatttattacatacatgtaatatccagataataaacatgttcaaaatgtattttctactgtatgttttttctattctttattgtttttctttgctaccattttattcttttgctgctttctgttgagatgatcaagtctttgatattgtacttttttccttattagtttgaaagatataaatttgtttctgatcaatacgatgttaatatgcattcaatatttaaaatacaaaggtgatgtccctctgctcttgcacaagaaagatacaagaattttctcataaattgtgttgaacccactaaaatatttgatcttagttgttagatatactaattcataattgtttttaacctattagaaattagttttattttgagttggcctgttttttgggcccttcttatttagacttacccatgaaattaccaagctctttgctcagtactgcttcctgttcctgtttctttcttttaaaattgcattcttttacctgtggagcgtaccctaagtgtacttagtggcaaaatcgtgttgttagtctgcaatactttttattctattgctcttcagattattctctttgaatttaccaggatggcattaatgttgaccctcagtttaactaaacagatgacaaatttcttgctacaggaccctgaactgtcttcttagagcatttatatgagaagacttgcaattattaattctttttctacccctttaagacacaaatcttctcctagcctttttgtcagttttacagcccagcagtgtctttctcaaggaccttggagccacgcttttgaaaagtcatcatctttcattttctgtgggtgaataagtgcctaatttcagtaagctacaattagcaaacgtaggcggcctaatcacattaaccaaactcgcccctaaattttccactagtttaacccaaagctctagaactctcctgtcttttctttcaactgaattgaatctcccttctttatgccaataatcttgacccctattgaaaaatcttgaataaattcttcctcacctgtttaattcatccagtaatttttttctttgatggaatttggtgcactgtcaatttctgtttttgtatttgatttataaagtatttattcaatatgagatatcatgttttttattaattttaaaaaaattagcaatattttcttaactattgccttttcccactcttttcatttttaattttttgttctgacatgttgcccttcacaatccagcttccaggtagcttcaaattagcaatattttcttaactgtggactttctccactcttttcatttttaattttttgttctgacttgttgcccttcacaatccagcttccaggtagcttcatttatctttcaaaaacatcatatcattaattcagaatctttatcaggccttaaatacattttatttgaaatggattcacattccaatgtgaattatattcctcaccccctcctttcttccctccctccctcctttcctttctttcttccttcctccctctctccctcccttcgttccttccttcctttcttatttttcttttatttctcgtgtgtgtgtgtgtgtgtgtgtgtgtggttgattttcttcacatccaaggacaaatatagcagatcagcagatcatatggctacattctgcttcgcaaaggtgtgcagtaaactcacgatcccttgatccttagaaagtttggcagcattttttttttcagtcccatttcaagaccacaaagtctggtttcagttgataatacaggatcaggccgttgtctctttaggcttatttttattcccctttatccatgtcttgctttagaaactgtaatctagcacataccaatattcagttttccacaatctctgccactatgtgtttctattccatttgtggagcacagaaatatttgtattgcttcagagctcatcaatatttgtttagttgttctttctgtttatctaacagtgttatttgtttggtgggaaaggtgcaaccagatgtgaattatttgtaccacaatgacaagaagttcgtgaatcgagtttacatatttatacatctatgctggctggagatttacatgtgaatattcttaatgactatatactctacgcatattgccagttgccttcacagtaacttcgtttgaatgtcacaagtgcatattcaagttaaaaacatacaaatcagaactcttcccaatcttctccattgcaataaataaaatagctccacgttcttgcaaactcaagcaaataaactgtcctagactcctttgcttcacatcagctccatcaaatgtaatacctagttctcatcattcttcatctccgttgctattttgtgaaactaaatattcactacccacttacacttaatcttgtcaccatatttattcccttcacagcatttatcacaccctgaagggggtttgttaatatatttttgttaatgacatcatttacctattgaacactgattgtcttcctgttcacagagcttttccgaattcattataagaactcagcaaatcttgggtaaaccagtaaaaaacatccatcagtattagatggctacattacgcattaccagaagtcaggatttctggtaacatagcccgctttcgtttctcaacaatgtacattataaaaaagatgtaggcaaatgtttaattttactttcaaacttttatttaatttatactgggtttcatatataaaagaaaaataaaaaccatttttcattgctatttcatataaattgaaactatggaaaatgtaattccttgataatgtggtttattccctgaaatataatatttaattatgtaagtttgcatcagatacaacctgtctacactctgacttttctgaaatattaaaatatgccaacccaaatatgatattctcctgaaagtgtttacttgagagactttattttcatagtaagacaacaacttttgtttggagtgcatttcctattctcattccccttaaatataaatgggcttaatgccccaattaaaagacacatggcaagctggatagagtcaagacccatcaatgtgctgtattcaagagacccaactcatgtgcaaagacacacacaggctcaaaatatagggatgcaggaaagtgtatcaagcaaatggaaagcagaaaaaagcagaggtcgtcatcctagtttctggcaaaacagattttaaaccaatgaagattaaacaagaaaaagaaggacattacataatggtaagaggttcaattcaacaagaagagctaactatcctaaatatatatatccccaatacaggaggacccagattcataaggaggacccagattcataaaacaaactcttacagacctgcaaagagactgagacttccaaacaataatagtcggtgactttaacatcccactgtcaatattagacagaatattagcaagatattctggaggcctgaactcagctctgcatcaagtggacctgataggtatctacagaactctccacccaaaaacaacagaatatacattcttcttggcaccacatgacacttattctaaaactgaccacataattggaagtaaaaacactcagcaaatgcaaaagaactgaaatcataacaaacagcctctcagaccacagcacagttaaactagaactcaaggttaagaaactcactcaaaaccacacaatcacatgataatttaacaacctgctcctgaatgactcctgagtatatagtgaaattaaggcaaaaatcaggaagttctttgaaactaatgagaacaaagaatctctgggatgcaactaaagtagtgttaagaggaaaatttatagcactaaatccctatataaaaaagctagaaagatctcaaatcaacctcctaacaccacaactaaaagagctagagaaccaagagcaaacaaacccccaaactagcagaagacaagaaaaagacaagctccaagctgaactgaagaagatagagacatgaaaaactcttcaaaaaatcaatgaatccaggagctggtttcttgaaaaaaataataaaatagaccactagatagattaataaagaagaaaaaagggataaatcaaatagacaaaaaatgataaaggggatatgaccactgaccccacagaaatacaaaccattaaataatactataaacatctctatgcaaataaactagaaaatctaaaagaaatggataaattcctagacatatacacactcccaagcctgaatcaggaagaagttgaatcactgaatagactaataacaagttttgaaataataaatagcctaccaaccaaaataagcccagggccagatggatttagaggtaaattctaccagaggtacaaagaggagctagtactatttcttctgaaactattccaaacaactgaaaaggcgggactcctccttaactcattttatgaggccagtatcatcctcatgccaaaacctggcagagatacaacaacaacaacaacaacaacaacaacgacaacaaagaaaactttaggccaatatcactgatgaacattggtttaaaaatcctcaataaaatactgacaaacagaatccaccagcacaacaaaaaacttactcaccttgataaagtcagctccatccccaggatgcaaagctggttcaatgtacacaaatcaataaatgtaatttatcacataaacaaaactaaagacaaaaaccacatgattacctcaacagatgcagaaaaggccttggataaaattccacatcttttcgtgtgaaaaactctcaataaactagatattgaggacatatacctcaaaataataagagccatttatgaaaaacctacagccaatatcatgttgaataggcaaaagctggaggcattacccttgaaaatcagcacaaaacaaagatgccttctctcaccactcctattcaacatagtattcaaagttcaggccagggcaatcaggcaagagaaagaaataaagggtattcacataggaagagaagaagtcaaactgtctttgtttgcagatgacatgatcctataatcaatgtgcaaaaatcacaagcattcctatacaccaacaacatataagcagagagccaaatcatgaaggaactcccattcacaatttctataaagagaataaaatacctaggaatacacttaacaagtgaagtagaggacctcttcaggtagaactacaaaccactcctcaaagaaatcagagaggaaggaataaaaggaaaaaaaccccattcccacggagagaaagaatcgatatcatgaaaatggccatattgcccagagtaatttgtagattcaatgctattcccatcaaactaccattgacattctttacagaatatggaaccaaaaaatagcttgtataccaaagacactcctaagcaaaaagaacaaagctggaaccatcacgctacccaacttcgaactatactacaaagctacagcacccaaaacaacatggtacttgtacaaaaactgacacagaccaattgaacacagtaaagaatttagaaataagactgcacatctaaaacaatctgatcttggacaaacctgacaacaacaagcaatggggaaaaattccctatttgataaatggtgatagaactggctagccatatgcacaaaatttaaactggactccttccttacaccttatacaaaaattaactcaagatggactaaaaacataaatgtcaaacccaaaactataaaaaaccctagaagaaaatatagataataccattcagccacaggcaaaaatttcatgacaaaaacatcaagaccaactgcaacgaaagcaataatttacaaattgggtctaattaaacttaagagcttctgcagagcaaaataaactatcatcagagtgaacagacaacctacagaatggtataaaatgtctgcaccctatctatctgacaaaggtctaatatacagagtctacaaggaacttaaacacatttacaagaaaaaaaaatcccattaaaaactgggcaaaagatatgaacagacacttctcaaaagaagacatttatgtgggcaagaaacatatgaagaaaagttcaacatcagtcttcattagagaaatgtaaatcaaaactacaatgagatactatctcacatcagtcagaatggcgatcattaaaaagtctggaaacaacagatgctggcaaggctgtggagagttaggaatgcttttacgctgttggtgggactgtaaattagttcaaccattgtggaagatagtttggcgattcctcaaagacctagaaccagatatactatttgacccagcaatcatattactgggtataaacccaaaagaatataaatctttctattatgaagacacatgcatgtgtatgttcattgcagcactattcataatagcaaagacatggaatcaaccgaaatgtccatcagtcatagactggataaagaaaatgtagtacatatacaccatgggatactatgcacacatcagaagtgtctgatttcaattatggaacatgaacattacatagtgagcccaggacttcttgttgtaccagaatgagataatgtcctttgcagggacatggacggaactgcaagtcattatcctcagcaaaccaatgcaagaacagaaaaccaaacaccacatgttctcattcataagtaggagctgaacaatgagaacacatggacccagggaggggaacatcacacactggggcctgtaagcagaagggagttcttggggggaaagagaacatcaggaaaaatagctaatgtgtagggggcttaatacttaggtgaggggtcaacaggtgtagcaaaccaccatggcacatgtatacctatgtaacaaacctgcacattctgcacatgtaccccgaagcttaaaataaaataaaaatttttaaaaaatagtttcagaaaattattgtaaaaacacttagtaacaaatcaatacaatttgtgtttatgtattatcaataacaattttttaaagtttacatactacatctcaattcaatagacttgggaattttttagatcacagtaatatttaaatagattttaatctgctgaatacttctgtttcttttcctgtaaaacaggaaaatgctcagcagctgggattcttaagactacatataagtgatgtatagaagtacagtgcctagcaaatatatgttcttgaaagtctttgctatactcacaaatttctcctcaagtttttagtttatcgtttatcactcaattgatacctcatatctaagaactagttcagacgtaggccataaatattaacctatgaattcaaggctagttattaatcagattttttaaccttttatgttacacgtggtttctgtttgaataacagattgtgttttactcttgaaatgaagtaacataaatcttgaaagctagttgtgaattgtttatgaggtgcaatgtaactaaaaaaatgaatttcagcttttccttgtgcttatagatatttaaatacaaaatgattagagatagataatgtaaatgtaatcatcacagatgattacattacaatacaaaatgtacctttcttacataaaaattttaagtagtagacatgctagaaaatgctgataaaaagtcaaaacttaaatatcacccatcagctcattttcatactccaaatctttgaccagatctatgtgtctgtgtttgtgtatatatctgcatgtctgtataattttacctgtagtctgtccacctagtgaacaatgagcaggcactcagactggccggaatttggctttcatactcctatatgaaaataaaccagggctctctggggaagtggctgatttcagttgtggacatgaatgtcacatagtgagcccaggacttcttgttgtaccaggaaaaaaaaaaaaaaaccactttgctatcaatatttttgtgtaaagacacaagaagtagcttaaagaaatacgcactcatcaaatctgggaatatcggcacataaacagttgctttaaaaaacataccagcaaaataaataagtgaatgtaaaagtttaactttaatttttttcattattcttgatattgtaattctgaaacaacccccattttatctataacctatactttaatttttcacaaaattattttataaatagaaaaaagtttcagaaaactattgcagaagatttgtaacaactcaatactattaatttctgtttatgtatcatcaaaaatacactttaaaaaattcacttattaaatctcaagtaaatcaataactctccaataatcttaataagtgtcaaataatagttctatgccaataatgtaaaataaatagtattaatttctaaaattcatcaaatgtttcaaataaatattaaaaactttattttaaaatatgctttattttacccagtttgcttttcactcttctataattttgtaaatgaaaactaaaacttagaaaatgtatatgcatagcagaaaattaccttgttaaatatacatgttttaatatacttgtgcctgtattataacttgcagcttttctctatctttgaagtgccatatgtaatgaaaaactaagattcttcttttacatttttagatccataattgtgtaacatttacgtattcttttggattagtgtctctatttgtgttaacaataatactcaatattaaaatctttcaaggtttttagttattaaaataaatcacagtatttccagaattttttgtcagctataaaaatataaaattcacaatgttttcttcaaaaacttttattagcttgagtgtaaaagcagtcttcaagttctggccagctaaattctaaaggtcagaagttcctttgaatgcaatatgattgcaacattaaatattctaacatattctatgctgtgattcaatgaatattttggatcaacatttgaaagtggaaatcttttcaggcagatatctctgattatggctgttctatatttattttttgaatatttagcattcataattttatggagaataatttttttgaaagtcattattaatatatgtaacaaatattatttgtgcatatgattaccttggaagttggcattggaaaaggaagaaaaatcaaaataaaaaaaggaaattaatagttgctgtgagttaggtattgtttggatattatgagcaaaacaagtcccttcctttttgccttatccagggaatgttaggaaaccaatttagtttgccatggatgttaaggcaaaagaatagaagaggatccatgcacttaagcttagctaaatgacagtgtaagtgtgaaaaatcacataagatgatgaaataattctataatactcaaaccaggagtagatcaataacctaaaaaaattattttttaaaaaagcaaaagtttttatagttacctcagcattccctcagcatgagataagcacatcttttagattatactttgccatactttctttgggaatttcataatatttcatttttatttgaaagagaaatgggttgtaatatttaaaatgctgtgggagacgaaaaaacattcatgttttcataatctcttctgggcatttttactcaatttcgttgacaattttgcaattacaaagttggtcaacttataaatggaagcaagttttattatataatcagtattgtatttttaacggatgttattttaggaaagcaaagcataaacagtgacctctattttataattaaatgtttatacaataatatataatgcctctatttaaaattttgcaaaaaactcagtggaaattcttgttaatataaagaattaccttttattctgtgttctaacatattaatccctagaatcagaatcaaccctgaaagagaggtcatgatttgtattctctgcagttcccaataagaggaaataaatagtattactcaactatgctaacagagacatacaaatttacttaattcccctgacacacaatggctttctaagtgtgctttctcattagtgtctgaatcattaaataggttcaaagtgcaggatttaattaatttacaattcttaaaatgacaaattgttgaatatccatggttacataaactatcatgtggaagttctaaagaggttaatttcttcattatgaaaaaggtcattagttttttcttttgcatttttttctctcacagaactgtaactagtccgagaaagttagaggatggaaaagagtagaatggtgcaagaaattataggaactaagattagaaaaagagtcaaggaattcttaatggagcttttatatactatgctacaaaaattgagtttattctggaaataatgacgatgcatcaaaaggttgaaagtggttggaggataaattggatggaacataaaaatattttttaattggaaaatatgaaaatgaggagaatcataaggagggattccaggcaaggaaaggtgagtacctgaaccaaaatggtacctgtgaaaacgtttgtagtagagttaaactggacctgcatgtaatattaagatgatcatggccagtaagaattacttttgtgatgccacagtggcagacatgaatttaaggactgtcactggattgatttgtaatgggatactaggaccatatgaccataaattatacacagtgagcagagaagaagagttattgaggaaaactgatgtgataagcatggcagacacaccagaatccagaaagggaaagtctttttgagacgtaattcaatgactttgtgttagttgagccaattttaaagttttaaggatggaatgatccacagattcaaatacgaccatttcaagtaaggaatgtactgaatcctgaaaatcactgaggttatgaataattgtagcaaagattttcatccttcctttcccctcccctcccttcctctttcttccttcctttctcttttcttttcttttctttttctttttcttccttccttccttccttttctttctttctttttctttccttctttctttctctctttcttttactttttcttttttcttccctttgttcattgttaaattcctatctgctcttcttatattaatccttctttctagttgttaaatgttctgttatcttgcttgttgggttttctatatacattcattagttggcctttcctcttcatacctactttcctctttcttttctccttacttgaaaaaatatatatacatatatatataatttatacatttatttatatatatttacatatatatataaaggactttttttgctgatgtagaaatttaacagtacttttcattcaagttttcttaaataatttgtgtttcatatttgtatttaaaaaacaactctggtatagcttcttacatcattttgaagtggtttttattgttagtgtgaagacaatttatctaccaagagacagaaagtattttctttaaaaaacaatagtaaatttataattttaaaaactatacatttaggaaataaaatgtaaattctattcaaccttagccacaattagaaatatagcttcttcaacaaaagaatagaagagcgcaaatgcaaataattctgaacttatttaatcttttttggccttaaagaaagcattggaaaatgtatatttattgtctatgttcttctatcacttaatgttttacaagatgaatttctgaagctacctggaaataaagtgcaagtaacaataacaggctttgtaacctgcatagacagaatacttttttaaaaaagaattccaggtaggaaccgtttttaaagataaatctcaacaggcagaattgtttgcaattagtccctttaaaaatattcctttcaaaatttaaaacttaaatcaagagtgaagttatcataaaactgctataaagagggatttttcccaacgtctgttactgcttcttcatttcttgcagcttgtatccaatgcatgttgctgacattatgctctgcagattctcattacaccaagttcttctgtgttcatctgcttcctcaaggccattatccattacatctgtctcagctcagctgatgctctggcagtggttctctgcgttgagcattgctgccacacacctttggtctttaaacctgaactggaatgaagcttaaactgaaatgtagagggcaaatggtgtgcaaaacaaactttaagtagtagtgattaatctttccaatgaatttttctgtttttagcccattaattttcaataaacattaatgaagtacttatcatgtattagccactatgttacctccaaaaataaagatgatagataaacgatatttggtttcggcactcatttaatatcattttgtgtgtatatgtatgggtagacaaactaataacattatgacatggataatcacatgatcactagaagctatgtagtgtgtgagcccaaaggactgcaagtaaaaggtggtaatgaatatgcactttctcatccccccaataacatcactaacacccaaatccaacctctggggagttagatccatgaaggcaaggatgctttgattttacaatggttctactcccgggtccctaaaattaccaagcactgaacaaatatgtgttgaattaatgaaagaattagatttgaacaaaatttatattctcagtaaactcaaactccttattaaaagactcttaacaaaaacaaacaaaactatgagcacttgcataattctcagaaatactatttgtttccaaaagcttaaacttctaaataaaaaatgtatagaaagaaaacactgcgtaaaaaataattttttgaattaaacaaattttaaaacttgtagacttcgcatttattaagattttatccaaagattgctgagttttaaaaggctgtttcatgtgcttttctgccttaactctttcctttacaacaaattgagagagtctggagagaatggtattatctggctcgtggtttttctttaataaacatagttagtttcaagtactaaatttgaaatgaagtaaaagaatgaataggcaagcagaaagctcatgtgacttctaactagaattttcaaaagggaagggaaaagagaggagaaggcaacaatcatttctcatgcattttttatttactggtcagcaggtgaaggataagccacacccacatcctagcacccacagagagaaataggccatggatcccctttggaaaagaaagaagacaaacatatcttcaaatctgaatctaacaatttcaattccttgaaaattaaatcttaagaacacctatcactcctcttaggataatcaaaataattccaacttcccaaaagtttctgtaataaaagctggggaaaggaatttgaaaagttccacttcctaccagctggacagttgtttaaattttatatagaacgtatccctttataaaagctatgcatttttttttagttttgtttatttgcttaaaatttatggaattatagcatcctctacatacttcctttttttgtacaaagagttagaatgagccctggttcttagagaaaactacacatcttgagaagaaagaaagcaagaaagaaggaaggaaggaagaagaaagagagagagagaaagaaagaaaaaatttctataaccaaaaaatgacaacaatttaaatcatgacataaatggagcttgaatttacactgaaaattgagatttgctggaaggagctaaaaattataccacaaaaaataatccaaaataatcactaaaaggaagtaaaataattttaaaatgataagcacattgctgatatcaaaagccaaaaaaaaattatccagcagacagaaatataaagaaaacccacaggagatagataaaactaaacctgtttactccccggagataactgtcctagattcactaagcaccttggtatctgtgattttgaatccgcaggggacagaatatgattgcacagacatctgcatacaaaagcgagaactggattccacataatgctaggaccgggaaagagcaattctactgagaaaactactctaaagatatggcacggaagtaggctatacaccttgtctacaggcaagtagagaatgctacaagaaatgaaaggccctcaaaatgtgacatgtctggatgtaaggccatattctgggaagaaatatgtgtagttaaaattgagcttttgttattcagaagaaggagagaatatttattggttcactaattattaatgtcttttggcatgtagaaaataaatcacaaagacagaatttaagtaccaaggtacattggttggaaaaaaatagcctggtctagttgatttacacttatttgtggcaatagctaaggttttggatggaaaatagtatttaacttagggaggcaactgggaattttattatgagggggttcggagaagagatgtgtggataattctttctttatagccctagaacatgagaataatttttcttatattagtgctcatcaaaaaatctttctgtgggtgagactcttaatagtagaatggtcaggatgacttgccatatggatctaaatattctccttccagttgtcctctgtgattggtcactgagtctcttaacacttggatggagggcagctacatgagtgtcttacttgtggagtcatgctcattgacacatccctaattttccttcagcagaaaccaacacaatgaggataaattatatctagtggtaatttcattgtaaatcaattttccactctatagatgaatgcaagttgttctcaatgggcaaacataatgtagatttcacatttaaaaaattggcttacaggcttcttcctctagagctatgcatggtctttcttaataccatatatatttccacagtattccatcaagcattttttctaatcaagatatatacctttactgcaaaaatattctctatcccacaaaggaaggtggtctcacatggaataacctacagatatttcaattacaatatcaaagaggagagaaagtatgcaacaggggttgctgcctgccaaaatgttctctatgcactgaataacaaacatacgatacttcttgttctcttattaccattgagacggccaggtgggaagggctccctgcagagtctctgacccacctgtgcactggggggagctgacattggagtggagccacagaggttcacttcatttgcagcagggaggagcctggctcctcctcttcctaggtgggccctagaattcaaagtgcaagacaggaagcacacccacagggactctggctatgtggagggtccatgttacccggtttttcccttttcacccaataaaaccctgccttattcatccttcaaatcagctgcaagcctaaattttcatggccatgtgacaaggaccccatctttagctgaactaagggaaagtcccgcaacaccgtaatacatgccctaggaagaattcctctcttatgattgtacttaggtacttgtttgcagaaatcgtcttctcaaacttacctcaaggctctaggttctttgttttagagcatttggtatataatagagaaatgctcctgccaaatgctacaaaatcagttccatttaaaatcaggcagatactttaccatttcagtatctctaccttactaaaaaaaacaggtaaaacagtacaaagtactatcttcagttactgattttgactatgcaaaagtaataaaagtgctgcttttaaacagaatcaggaaacatatgcccagaaaattctctgacatgcctcctaatagtaacatgtccaaaagtaaacattaaaataagtctactttatgatggcccacatcaccccaccagataaagaattttacccaaagatggaaggtgaagataacatagactaggtaatattgcagagaacaaataggagatataggattgtgaagggttgcaaaaaggaggactatagacctgatctgtatttttccttcctagtcattagtatatttgtgcatgtcattaattttctcattaaactcatctacatgcccttcatgtaaatgcatcatgtcaatagttcttaatttgaaaagcttacgcataggcctaataatatggagaatcatattttgtagtaaaatattttgactagtattggatgtgagtcatagattcttgacagagggtctgaggccttattgataagaggtatactcattccccttggagattaaagtgagttcacttccagtaattctggatataaatggtttatgttaggtggtatttgttttgttttcattaaagacctaatggatggatggatggttggactacagatagatgaatgttcggcagacaaaaaatcgaactgtgattgatacattttatttttcatttttgccttcctagtatcaaaacaatatttttatttgttgagaaatcccccaatggttataattcaagatggggtaataatttgcctcacactaatgaaactgaagcaactgagattcaatgatataaatacttaagctcactttgtgtttcagaactcagaatgccagattttttttctcttctacatcataaaagatgtcacaaacatctacatattcatcctcgagtaatactgactagcttaactatattattggaaataaattaagaaattttctttcttctattcccttgtatagtttaatgatcaaatatggatgaaagtgctaaagttgtgtgtgcatagatacatacaaaaacttatacacacaaatatatatacagacagatttgtatatatactaaacctcaatgtatataaaataaccaaatactttttttatgatttattatttatttatttttttaagacagagtcttgctctgttggctaggctggagtgcagtggcgtgatctcagctcacggcaacctccgcctcccaggttcaagcaatttttgtgtttcggcctcctgagtagctgagattacaggcacccggcaccactcctgggtaatttttgaatttttagtaaagacagggtttaccatgttgcccaggctgttctctaattcctggcctcaagtgatccacctgccttggcctcccagtgtgctgggattacaggcatgagcccccacacctggcccaaatatagttatttttacaacaaaagtcatgaaggaaaatattgttccctctaataaatgaaggaaacaactaagtagtgattgtacttaagtatccagcactgctactatgttgataatttgagctatccgaagtacttactaagagagtttgtctcctcagatacacagtatttcaagcagaatgatcattagtcagcaaaaggcaaaagataattagttctactctttgtagtttccacactaagcagtctgcttagaggcataggagatgatttgaaacagcagttcattacatacaggtacccattgctctcagaattatttgttatgtcttacactgttttatttcattgcttcttttctggctacattgtttaatttttttttcttagaccatttttttcctattcctaagcctcaaatgttctaaattatttggtttattttacataattttgtttctttaaacagttttaatatatctccaattgcttaatatttaaatatagtgttattatttatttattttgtatttataattcccttataaggatttctaagttgacatttatttagctactttttaaactttatctctctttattatattttctaaatacactaatatgctttcattttcttttgctttttgtaataagactgttattaatgtactttgacctagttataactgaatgtagatttaagaacaaggattccacatgttgtaaataggtaaagctgggtctttcccctcccttctacataatacttcaattgttttgctaattaatgaccttctatttccaaagtgaatttttttctaaaaatcatcatttttccctcttatggcttagtcactgatacatttctctagactccttctgtatccatttatatttttgccaatatactctttggtattaatatattgcattccatatgcctccagttcccaaactgcacgtcaaggcagtcacagggacatcatagaatgtcctaaagtttcaaggaagcatagcaatacttggcatgtccaaatatcacggacactacttactccaggtaactcagtttcaacattatctcatactatatttctttagaggatgtcacgtttttgtgaattcatttcttggctgcaagaacacatatcccattagtaagtaattgtgatttttttggcaatgaaatacaaatatttggttttctttccattaatgtgaagtattttttttcaaaaggctacagaattgttggtatataaattcgtaagttatttggaactaagtacttaataaatgtaactcaggtaattcggttttttttttttttttttttttgagggagttccactctgtcacccaggctggagtgcagtgtggcacgatttcagctcactgcaacctctgccttctgggttcaaataattctcctacctcagcttcccaagtagctaggattacaggtgtgcaccaccatgtcctgctaatttttgtatttttagtagagacgggatttcacactgctggtcaggctggtctcgaacttctgacctcaaatgatccacctgcctcggcctcccaatgtgctgggattataggcatgagccaccacacccggtaactcaggtaattcttttactctaggagtgctgtgaaagatgaaacacttatggcaccatgaatgcagaatgtttggtaaaagctgccacaaatcctcagaggatgagttgagttactgccaagtgcttcctctactgtgtatggaactgaactatttcagatttcaatagcaaatgctcatcctggctaggaaaaaagaaattttaataggaccaattgtattcttttatccatggcattgtttagatatttaaattaccaaacttatttttttctggctaaattatctcaggccttgtaaacaaaacatggtaagatctgtggaagaaaaagagaagtttattttctattttgctataacaaaagcaacaacaaaaacccacctgcagattgggaaggcacagccttcagtgtaagtgaagtgtgctctctgaaggataaagaaaagactataggttttataaaaaggagaaatgttacacatggttctttgggaaatttcattggcactaataatgttttgaggagctggcaagctctgattgctaagtcactgcagcagaaaaactagtctgagtataagttgcggcaggttgtttcagcagtcatctgataaaaccactttcaggttacagcaggcattcttagctgccagccttgcagagaaacacatttttggatcaatgtgttgtgccctgagtgcttattccccatggcttctccagtccattttagttgggtatgacaaaaatgacccagctcttataatcagctttcagtctttatagttttcttcatagaccagttcctccattttcttactgtggtggagatggctaagattatctgttacctccttgtttgtagtagaagtagagctctcctgatttttgagctgggcagctggctgcctttctttatgttggcaggctctcctgtggtggggtgtggctatatcactgtgttcacactaatcgatgtaagctggaatgaggtgtgcaatttccaagtcatccttgactcacacacttgccagagatttcctttcttttttacacatgcctcctattggacagagcaagggcattgactcttgcttggccattcaggtataaaggaaacctttgtggatagcaaagaaatgaaattaactagggttttaaacaattctgtgcagcaaagtccccacctgcttggactagctagagtgttatatgatacagaaatgaatttttatcttatataatccagtgtatttttagacttattgttatagcctagttattattctaacacatttagcatttaaattatctttttttttctttttcttttcttttcttttttctttttttttttgagacagcgtttccctctgtctcccaggatgatgtgcattggtgcaatcttggctaattgcagtctcaacatcctgggggcaagcaattctcccacctcagcatccccaatagatcaataaatggaaccacaggcatgtgccatcacacttggctaatttttgtattttttgtagagacaccgttttgcaatgttgcccaggctgatcgccaaccctgcactcaagtgatctgtccgcctctgtctcccaaagtgttgggattacatgcatgagccacagtgcccagcaaaacttgttttgttgacatttttactaattgtagcaaataaataatcacagacaaattaaattatatgttaacacacagtcatggattttgactgattatttacttttcctgataatttgtgagtacatcagcttttgtaacctcaaagaatgtgtttaatataacctagacacgaaagcctaatgtaagcagatgcctcatgacttgaatctacccagagtccatatacagctaatcatacatgcactaaaaagattcattgccaattgttttttatgaattatagatattagatgatatggcttgaagaaaaatagcatcaatcagcaaacctcccctttgggcatcttcatattgatcacaaagttctttggggtcctgccttctgaaattaatatatatatatataaattaatatatataactatatattagttatatacttttatttttagcgatattcatctttgattcttatttaaacactattatgcaaaacaagaatcctagaagttagcatggcctaccgcatttcttaaaaagcagttcagtcaccatttatggtcacttgaagctattatctctgtttctccctgcctttcttaagtgttgcacccatttattacacatatacaaattcactgtgttttccctgtcatagttttaagatatgtccactcatctttcaacacttcttcctagaaaagtacaacctaattctcctacctctgactatggactgaactggacttgctaatttagaacagaatatgccagaagtaatggtatgtgacacccaaggtgggtcataaaagacgttgaatccctgaaccttctatcttgctcgccttcagggataactcactctagaggaaagcagttgccatgccataaagacactcaagcagccctcagggaggcctaagtaccaaggaactgaggcgttctgccaaaaaccatgtcactaagccatcttagaagcagtccctataaccccacaagaggtctcacatgactgtaaacccagctgacatcttgactgcaaattcattaagtgatagataactggtttaaattacgttataattaaagataattttaaagtaagataactagtattgagtaaaagaaataaacatctgaaatgtttaccttataccaggaatgagataggcacaatcacccttcccttttccatgtcatttagggagatattactcgcttaagattagggaatggacttctattcaaataaaagtaattttatattatatttgcagatgtgactgttttaaagcaagcctgttttctatttaataaaattaagtatgtgtacctccatcacccatctcatcatcttaccatttacaaaatttccacgtaaaattactctatttgatttgacttaatcagaatatggatagaatttgttttctttgaataaataggcagatttctagtcaactttaaaaaattatctagctgtaatgtttctccaccctagattctcactttgtgttcaaaaccatcatttaatttaggtgtatgatgtgttgagagttgaatctgtaacatcatttgtggtctctaaactcttgacactaagatacactgtaacacctttacattgatatgtcttctctgatttgtgtctctggtttaaaatatatttttcatttccatgtttttattgcagtttgaagtgtcatagagaagatgacaatcatgtttcacataactggattatctccaaaattgagtctgatgagaacaatgccattcaggatggttattaaaaatgttaatactctaagaaggaacatggagttctaaccatctgtctgagaactaaatcccattattatattaaatcatgcaaattattttgtagaaagtgacatacaaggtcacttgtatgtatgtattgtattgacatacaatatttgtgttgaaaaaaatatattgtattgaaaaatatagtaaatgtatacaggcaaatgttcactttgataaaccagattttcaaaaataatacaaagttaattttttaaatgctatgggatgaataaaattaacttggaaaggtaaacataaaaatgatgaaaataatatctagaggaaaagtttgagatgctgtaaataaatgattttttctgtttgcagagcgaaacgtcttttgttttatcatgtacctatgtatttattttctgaaacattactgattaatgcacttacacaagtttataaatctaaacactattttttatttttaaaatatgtaaaaattgccacatttactcagtgaatcatgcttacaatctattttcttggaatattttctgtgttatatgaaaaataatagtttagataatagcttttccaaaatgagacaataaaacagataatttcttttactcactgttctgaggagtatgcttataaactacttgccatctattcaatgaagaaagtttcctaaccacttgtatgtgaacagtttgtcccttagaataaaattttgacactgtcatgtcagaaagaaccattatatgaatgaaaatgtatgagttaataattatgtgtttcttgaattaaatatttatgagcaatttgcccaactaagagaactttaaccaggcatttttgactgtattttttaattcatgaaggaatcaggaaaaatctttggatagaacattagatgagccaattgctgaataaatggaaccagagttgaaatggacacagtaaaatgaagaaactgaaaaggaaaatagaagttacattgcaaaattggaagttgtattggttagatttccatcagatggggtatttatgaattctaaaagaaaaaatctacctatacttattatatgtattaggtagaaatgaagtatttaaaatgaccacttaaacatttagtctcagtcatttatttggggactgagagtggagcctggaaaaccagaaaggaaagtagaacagaaattacagaatgaggcaataatagctttatttactataaacatgattttgatataatgtgtttatatatcttgttctgcttcaggaaaactttagtaaactaagctgcagataatttggtatttttcaaaacacatccatatggaagagagactgcatatttctagtgtgaaattaatttcaaattgaatcaggtaataaaagctcaatgaaatatcatgtgtaatttttataaaactaagtaaaattatttttaaaaattcatatatttgaaagttatctatgctttgatactcatatttctttttattttacaagcaatatagtttatttactctttacaaatatattaaaaaatcccaccattggcaatcattctctacctaaagttgtaaagttgtatcagccattttttttctcacttatattttacccaggatcatgctgaaacagtgcctataactggtcattaccacaaacatgtgtaattgctcccaaaattttcttccaaaaaatttcctacttgacccccccatattaaacttagaactatatatatacacacacacacacacacacatatgtatactaatagttcatatatgtgtgtgtgtgtatatatacacatacgtgtgtgtgtgtatatatatgtgtatatatgtgtatatatgtgtatatatatgtatatatgtgtatatgtatatgtatacgtatatatatgtatatatatgtatatatgtatatgtatacgtatatatatgtatatgtatatacatatatatacatatatatatatatatatatatatatatatatagtattagtctgtttgcatgctgctatgaagaaatacccgaggctgagtaatttgtaaaggaaagaggtttaattgactcaaggttccacagggctggggaggcctcaggaaatttacaatcatgatggaaagaacctcttcacagtaaagcatgagagagaatgagagtgctgagcaaaggggaaagctccttataaaacattcagatctcatgagaactccctcactaccacaataacaacatgggggggaagctgctcctatgattcaattatctccacctggtcctgcccttggtgtgtgggggctattacaattcaagctgagattcgggtggggacacagagccaaaccatgtcaagaattatccaaatctcacattttaaaaatccagatattcaagaatctcaaaaaatactaagcaggaaaattcaaagaaaaatacttctaagagtactagaagaaaataagattacatgctaataacttccatgaaaatagacgcaaaaatccaaagtaaaatattaggaaattgaatccagcaacatataaaaaataataaaacaaaagcatgaaggctaaccccagagatgcagttgttttgacatttgaaaattaattgatttatgacattaatagaataaagtagaaaaaatatgtttattctaatagacggtgtattagtccattctcacactgctataaagaaaaactacctgatactgggtaatttatgaaggaaagaggtttaattgactcacagttccacatggctgggcggggggcactcaggaaacttacaatcgtgctgtaagaagaagcaaggtacatcttatagggtggcaggagagagaaaaagcacaggggaaactgccacttttaaaccatcagatctcagaatatgctgggattacaatttgagatgagatttgggtagggacacagagccaaaccgtatcatttcgccccagcccctcccaaatctcatatccttttcagatttcaaaatcaatcatgccttttctacagtcccccaaagtcttgactcattccagcattagctcagaagtccaagtccaaagtctcatctgagacaaggcaagttccttttgccaatgagcctgtaaattttaaaacaagttaattacttccaagatacaatgggggtacattgcaaatattgagtaaatatttataggcattgagtaaatattaccattccaaatgaaagaaattggccaaaataaatgagctacaggccccatgcaaggccaaaatctggcctgacaatcattaaatcttaagctccaaaatgatcttctttgacttgatgtctcatattcagggcatgctgatgcaaggggtggtctcccacagccttgggcaactccacctctgtgtctctgcagggtacagctcctgcagctgctttcctgggctggcattgagtatctgtggcttttccaggtgcagggtacaagctattggtgggtctgcttttctggggtatgaagggtggtggccctcttctcacagctccactaggcagcaccccagtggggactctatatgtggttccaaccccacatttctcttctgcacttctctagcagagtttcttcatgagggctccacccctgcagcagacttctgcttgaacatgaaggctttttcatacatcctctgaaatctacgcagaggttcacaaacatcaactcttgtcttctgcaaacccacaggcccaacaccacacagaagctgccagtggttggggcttaaaccctctgatgcaatggcctgagctgtactttggccctctttagccacagctggagctgtagtggttgggatggagagcatcatgtcctggggctgcacagagcagtggggccctgggcttggcccacaaaaccatttctccctcctaattttctgggcctgtgatgagagggactactgtaaaaatcaggagagctctatttctactacgaagtagtagaaagttttccctcttttatgatattagcttgcagaaaattagaaatagaagacatctttcttaatctgatgaagaatttctacaggaagcccacaagtagcatcatgctaaatgctaaaacttcgtacaatatctcttcagaaagagttataaggcaaggtgaaagataagaaagcccaagattgccacttctattcaatattgtattagaggtgctcgctagtggaataggcaaatagaaaaaaataaaaggcattcgaactaagaaaaacaaaaattatccccattcacagataatgtaactgataggcagagtatccaaaggactacgcagacaaactattaaaattaatatttgaatttgttaagatttatatataaggtaaatttactaaaactcattgtgtttctatatattagcagggtggcatgcaaaatgtcaagagtaagcacattaaaagctgctcaaagtcattattaaccaagagaaaaaagtcaacatcagagttaatactattacaaccccaccagatgagctaaaattaaaacaaaatgagagaaaaactgactagtgttggtgagaatgtgagcagagggaactgtcatatattgctgcagcaatgaaaatggtactaccactttgaaaaaaaactgtttggaaattattaataaaagacttatgaaaagaagtacatactaattggtatcagggaactacaatagcaatgaaataccaattcagaacctttgacaaaaattaaacaatctgatagtataaaagaattttatggtataagaatataaggaaatataaataagtacagtcatgtcgaagagaaagtgagcaatatgcaagaaagttacagatattttcaatcgaccaaaatataattctgcttttaagtgtaaaccataaaaaaaccttaaatgtatgtaggtttatagtaagtagatgtggtccaaggaaacatgtactaaaacttcttggtaattcttttgactatttagattttcctgttatataattatctatttttttattgaaatgtttgccatgtcttactacatgttctagaatttttaaactattattacttctcttttatcttcatgtcatttgcttcttcatatctactcttgtttgtgtgtgtattttctctactttttaatgatcaagcttgagatttacagtttgttcatattttcattagcatttggattgataacattcccaattacttaatattttcaaaattatttttttatttttcaattgttattttcatagtttctttttatatttctttagatttaagattttaatacatgcacctaagtttaaatattaccatttaatccctgcttagttgcattgctcaaatttcaatttgtagatgttattcattattcaacaataattgcaacaacaacaaaaaacaactctactttcctataggacaaaaagagagaagagtttctatatttatgatagtgttactttttccccctttcacctttgcatgattttgacattttactgaggcttccttaatcctcactgtgtcactgtgggctgcattaagctctgtgtgctggctttatgcttatttaaaaaggtgattgaaatacactatcatctagggtcaggccttctctaattaggcagaaacatctggtctccctcaagtgtctatgttaaatggtttattattaattttgtatgttaatgatttggaaccctttaattttatgaagccaggaggattattatttttgccaatgacccacattacatgaaaaaaagctataaattattttttggtaataaaacattgatgtgatacgaacgttgcttaaagttacatagcaatgttatacaaattaattcaatgattattgtttaaatcaatacagaataatcttgccaaaaaaacaaataaattaaataatttgaataaccaatgccagaatagttatctcatcaaaacaaatagttctagttagcaaaaaaattaaaatataaataaagcaatacacagtaaatttgattttttccaagatatttaataaacgttatacatttacatttataagagattcagaaccaatgttttaagaatggctatcaatggtaaattgcagtttagaatatttattctcaaataaacactgctttaagattattttatatctgtcaacaaaatttgcttaaaaaatttcaagatcaccctgagaatatgccctagcaggctattgtttgtgtatgtaaatgtataaatataatattgacttatgcggttggaaccaagatgtagtttagtataataatcctatgaatcattcacactttcaaaatgttaatttgcttgaattagtttttctgaattttctcacaaattattccgattaggtataatttactactcgctacatctccaagtctccgtaagatcaagaccatagatatttcacatcctctatgcagcgactggcacagtttctcattttcaggtcatccttctttgtcccttggtttttctctaatttatacatagccaatatattttcatcattcaatgtaattaagtgtctactaaggaaaaactaaatatcttttatttgaaacttgatatatgattgcttttgttattgccatttttaaatataatttttcacattacttagcaactctaatcttatggcagatgcagccaatatagcatatagaaataaataaaagcatcgatgtgcattcttctcatgtaaatgtgttatacatcagagatgctgccaactcttactcattttcaaccttgaattaaatgcagaatgtggctggcaaattatgtcttaaatatctgactcaaaatttcagtagatattctatcccattatgtaaatttagatatccatctggtacatggtattttttttttcatagccaacctcaggattcagactatactgcttctatttcaaaataactagattaaagctcatggtatccttatattagcagcaccataaaactcttaagtttccacaattatgtttccaaatatttgggggaaatctgaattgtcaaattccttagagctctcttatggctaaaataagttaaatatattatatataacttacatataacttttagcaattccaaagttagtaaaaccaggttttggtagatttccacatgaacttgtacttttagaagtataattaagtaatatatttgctgcaggtaggttacctgaaatagagtagtggaggcaaaagctgggttaaagctttattgggggagtgtaatgccaatgaaaccaggggaaagaaagaaggaagaggcagccgatggaagagacagctgaggaaaggagaaaatatcagaggtacatttcccagctggccacagttctcaaaaaccaaaccgactgctctatcttggggacgtctagagatagtccaagtgaaatgatcacatcttgggatttttcttttgaggttgggagtgggattgcaacaaattgtgaaatattcactaattgatcctcctgttctcctccctctcaccatcaaagttggctgcataatcattatcatcattgcaattcccacttgtggtagctggtcccgccaggccacttcaggaggaagaagccacagctttaaccacttcaacctggcaagtctgtagacctcatggcttctcattgtcagtcattagtacgtgggtatattagttatctacttctgagcaataaattatcccaaaacttagcggtttcaagcagcaaatatttattatgttagcttctggaatgatgacagtctggttgttggctggggccattcttaaaggaacatccaaattgattcatttatgtttattaaatgtatgtgttgttcctctttattttcttccccactcaagtggtgatttaattgggaaattggtgcaagtgttaagcagctaaacacgaaaacaaatctttgttaacaaaaatactgatagcttgtatttatggtcttgtgtgttttatcatttctctataattaggcagtattggtgaactaatcatcagcaggcttggaagatcatagacttatacagcgaagtatattcacaactgaaagtaattcagaaaataggctatctgcagctaggacggacccctattagaagagtaaacagcagaaatatgtaagcctagttccttcctcattccaaactcagcagtaagctaagtcactcttccagtgggtgagttggtggaaagtctagggaatgctactaatggccaaaggctatagcagcacaagaaaggaaacggaaggaaaaacaatatttgcatttaataaaggaaaatgaataaatttaaatgttgcaataagcatgattcataaattatgagcattggtaaaaatatgataaagctgctattaatttttacaaaaccagaatactacctaaatttaaaaatcatgagtttttattaaggtacacttctggaaaaatctcagtgagaaaggtaaatttatattacataactagtgatgctttctgtgcatttctcattggttatttctgaactgttggcatctctgtataaactggtagaattgaaagttaagatatgtgcttactaatgaagaagggataacgtgcaacaaatcaggattaaatggtttaccaagtctttatgaaactaggtaattcataataatttgctataaagaaatagaagttagctaatgaaagtttcatattactttccattaaatataagtattcaatacagtcattattttactttgttgtgaataagccccaacaacatttttaaacgaaattaaatcattttaacaatgcttttttcttgcattaatgtaaccacctggtggcactattgattaaacttggaaaagcattaaatttttgataagtccttataagaacattttctacattaaaattgcaaattatatgtgatttctgctaccatttctttctttgagtatatcaaagatggagggctgttgctggaaaaacatgctgaaaattatttgaaatttcaaatgtaaagaaaatcctacttattttttacatttgcaaaagtcaaggacttacaaatggttgtggtaatattcagaaagtgaacataaagatgaatattacatacttatgatttctatatttaattggtgaaatcatttcaaatgggatttatgtattaaaaatcagacaaaagtatgcctcactttctttggtgatcatctttgtgatttgatttcagatagcatagcaagaatatcagtactctctgaagtagagatacctgcatctcaaatataatcttacataaaattcatttatctataaaattctcttacagattcatttataatctggttgtatgcctgccagaaatttaaaggattgtgatgaactacaatagaccttaatatttttgatccataaattatggaaactttaaaactaataaattatgtgcaggatgtatttaaaaatatcagaagatttttaagtaaaatattctttgtgaaagcagaaaggaacaggatatcagtttactgagacagcttggaactcatttgagagataaaaaggaaaaattaccataaggcactaggaaaaaaaaaattataaacattatttgaaagtaaccaagttctgaatgagagaaaatatatgattgtctcacattaataaaaactaaaatatattggtcattttaggttattacatatcaataattttctaatttcagaactaaaattctaagttttaatgatttgtacacagttgatttgattcaaatagtcccttatatttcgtttttggaaggatttagttcatttatatgttaaggtatataaatttccttcttgaaaggattcagtttacttatatgttaaggtatgtaaataggtttttataactagtaattattttgagtcatacatttttagtaatgtgaaagaaaaaatcttttctgagatgttatgtgattgaaatgatttcaaataattctgtgaagaattatagcaagtaaaaataaatgacttcaccaactaaaaaccatgaaatattttcatatgtgctcatgtcgtgctgccgtagacagctaaagtcagaatgatatatttagttacattagtctgggcattgtgttctaaagaaattctaaagacagaaaaggaagaaaggctcatattatgaacatttattatgtgtaaactattgttatagattaaagtagtctgaataaatctaagaaaaactgaagtcctggttaaatttctaaacctacctacacacatacacattcacacactccactacagtcagaagtagaaacatgtatgatgatttgaacacatttctctttcttcttttggtctataaagacatatatgtaaattttgactttaagataagtttactattgtaggtttactttacacttttgtctgtaaggttatacacggagcccccaaattttagatctttgttctactgtgacaatcactgtataattattcttgtctttactggcaggaaaagataaccgaactgtggtttgtagagttcaattacagacacagacattatcaaaaccgaagagtaaaactaagaataattcttacatgatttactaagtcctctgccattcctattttcagacacatggattggactacgtatttgctaagataaacaaattactcctaatcataactagattgattacattgatatacctcatactcaatgcaaaaaaaaaatgcagaaatcaaaacttggcagacaagttattccattattaaagtattttgaaaagttctggatatagtaaattcacagttattctttgagattatattagccagtcctgagataaacaaaatcagcaggacttatgtgtacaaatatgtatttatacacaaacacacacacacacatacacacacacacacacacacacacatttggagagacagagagagaatgaggaattgggtcatgtgattaaggagctaagttctatgaacttccatctgttaagctgaaggctcaggaaagttggtcatgtagtttaaaggcctgagagtcagagggtcattggtgtatattctagtccaaagtgaaggcatgagaacctgggtcttcaaggacaggagaagatcagtatcgagttcaaccagtccagcagaaaaaaacttcaaactcccttcacctttttgctctgttcaggcccccagtgtatagtatgatgcccagccaccctgaggagggccatctgcactcagttggccaattcacatgttaatctcttctgaaaacaccctaaaacacacctagaaataatgttgaaccaagtatcttggcattcagtggcctggtcaagttgacacctaaaattaaccatcacagtcactcttttctgtgaaggacagagctacattctcaagttgaaactcaaaaacagacaatacatgcatatgttctccataatatcctcttacgcctttaaatgttatggccatgcactggctacactatgaatactatgtaatattgcacgagatacaaaaagttcagttagaaaatataagaaaaaatttgacttaactagaattcttaactagaatttacttaactttacttaactagaattctttcttccccagtgatttgttactaatgagattaatgttttgtaaaaattaatagtggtaactgcttgttcaaaaattttataacctatagattataatttattgaatataatttataatgtataggttcatttaaatgactacaatagacacttgtaattgttcctgcttcttgcctttccataccccagattaataggaaagaaacacagtcagccatgactgcctcctactccttaaaattcaatagacttctgaattaaccacaatcctctcggtctactaccttagtatttatgctatctgcttcatatataattcttcctgcagttacccttcacatggataactgcatgcaattttaactagtactttttccgtgcacttaaccttatttttcaacctccaagtttttctctttcaattggtccatgctggaaggccctatttttcttttctgtctattgaaaccaatgattgtaggagacaatagctggttttgagtcttatgcaattttggaaagaaatgcttttgactagatctgatgataatataatgctggtaatgcataaaatacctctgccaactttctttttacaaagaagtctaagtttcctaagctatctactattcaaattttctttacaaattttacaaaagtaagcatcaaagaaatgtattattactaaggaaaaaaaaactcaagccacaaaagcattatacatcgagtgctccactcacatttcacaactactttgttccctatgcagcaaactttcccagtatacttttatcatattatgattcttaaaatttaatttttttactacatcaaagtatatgtaacattgtttttcagtaaccttgtaataaactatcagtaaatatgtactgaaaaagcgtgaataaattccaaatttatgtatagttgaccctctctgcagttcttgctttcatttatttaattaacaaacatttcatgcatacggtgtcccaggcactgttttaggtgctgaggcaatattaatagtgcttacatctgcagaggagagcactatatgagttttagatgatatatcccggttgatatattttggattaatatgaacattttcttgctcaataaggccaacatcgtattcttttcaaaattcaaatatgcttaccttaagccaaggaaatagtataactcatatggcaattaaatgttgctcttaaatcaaatgcattgcattcagtacctaaagttatgaaacctttttattttcgagacacttcagctttaagttaatgttcaggcaggaaaatgctctggttttatggatatcaaccccctcaagcaatacggactcaagagatttccctgtgagagagcactgcagctgtgatttattaaattaaacatggttcatggcaattagccatggaagtttcctttgggccactcttctgatcacagagaaatataacacaaacgactggaatttcactgacggaactgccacttccctgcaaagtttcagctcttcagagtccacctgctacctctcactgttctcagggctatgatcttatgatcttcctcaaaattgtatcaacagtatttttcactactttttcagttttatataggtaaaacttccattagctgagctttgtatatcttttttttttttttgctttgttttatttttgagacaggtccttgctctgtcacccaagctggagtgcagtggcatgatgatgactcattgcagcctcaacctcctgtactcaagtgaacctccagcctcagacccccaagtagctaggaccacaagcacacaccaccacactcggccagttttcgtattattattattattattattattattctgtagagatgaggtttcaccatgtttcccaggcttgtatcaaagccctaagctcaagccatgagcctgccttggcctcccaaagtgctgggattacaggcctgagccacagtgcctggccctttgcatacttttgaatttttgttattgtttttactatttgcaatggtttggctggcaatggccaaatccacaaaagcataaatgaaaaactaagctatattgtgtaacttttaagaaaacatgaactgaaatacatattaataattatcatttgctcttttccatttcacactggctggaaaacctttttgtttcctctttcttttgtatttttcactgcagctgcaataaaactcttaattaagtcttggcaatgccatctaattggttgcatagttgcttccaaaatgacagactcactgtaccctacaccgcattgaactttgtttcttgcagtctccatgcatttgtacctataattttctctgcctaaaatagtcttgcccagatattcacacagctgccattcattatttgtttttcaactcaaacattacttccttggagatgcactcgcatgctataactatatcctatgctcactaagtagctcgaactatttacttattttaatttttattgcacttattattatagggagccatatctcatttaccataatcatacgtctgccactgaatataagctgaataggaacaaatctttatttttcatgttctctaggaaagagagcctgacacaaagtagataatacctaaatatgtataaaataaatatataaaactatctccagagatgccaaattaaagttgctgagaagtcctttttctcaactcttgaatctttcaatagtacagacgtaagtgcatattactgatactatcgtagtgcagacctatctgtttttatgatatggagtttttaagattattttcctactgtgagcttagaaagtcaagaatattgggattggccgggcgcggtggctcacgcctgtaatcccagcactttgggaggccgaggcgggcggatcacgaggtcaggagatcgagaccatcccggctaaaaacggtgaaaccccgtctctactaaaaatacaaaaaattagctgggcgtagtggcgggcgcctgtagtcccagctgcttgggaggctgaggcaggagaatggcgtgaacccgggaggcggagcttgcagtgagccgagatcccgccactgcactccagcctgggcgacagagcgagactccgtctcaaaaaaaaaaaaaaaaaaaaaaagaatattgggatttacttgaagatattagggggaagcactggtactcatatatcccgtaacagaaaaagtcaacactcttctgtgtagaaactctgccctccttgtatgtttatactaattaaagagatctgtaaacaagcctggagaaggactagaaacactcacctaaccaatcgtataaaaatactcatccctagtgatcataagatgatagatgatgctcagaatatctttccatccgatatcaaatatattcctttttatgttgctcaattctctttattcctttttttttgcatttttaaacataagctaatttagaagagttttagatttagagataaaattgtaaatatagcaaaaatagttacctcatgtctggtacccaggtttctctattattgatattttacattaacatagtacatttgttacagttaatgaaccaatattgataaattaactaaagtccatacttcacttacatagctactctttacttacatgttatttttctcttctagaatcccatctgggatacaacattacaattagttgctctctctccttaggctccttttggctataatgtttctgacttctcttgtttttgatgaccttgacagttttgagagtacttgtcaggaattttgtagaatgtcgctcaagtggtatttccctgatgttttcctctgcattagactggtgttacggatttgacgagagaaacaaacatagataacctatttcatcacatcatatcagggatacatactaccaacgtggcatcaacgttgatattattcttgatcacctggctgaagtcgatcttcctgctgtaaatttcttcattgtgccctttccacccagtcactatatacagcccacactaaaggcatggagtccatacttcaatagagggagttttactcctcctctttgagagatgactgtctacataaattatttggaatcttttgcatgagagatttctagtctcccatcttcatttatttatttatctatttaatcatttatatgagtatgaacttgtgaatatttattttaaagtttgggttagaattcaaaataccgctttttgtactttgctacccaaagtgttccagctttggtcactgggagtcctttctacaggcttctatctccatttgacatatcctcttcactttttgttgttgttgtttatttttttttttcagaaatgtccggtattacaatatgctccagggtcatcttgtatattttctgcctcagtctcaggatcagctgtatctccaacaaattctggttctttttattggagaatggtattaggaaacaatatttgggcaccagctgtacttgttgctattgggatagcattgcttctaggcctcctcagctaacaggaaaaaaaaagaaatatacatatatttctttacatatatatttatatatatttctttatatatatatttatatatatttctttatatatatttatatatatcagtatatatttctttatatatttatatatcagtatatatatttctttatatatatttctttatatatatatatcagtatgtgtgtatgtatatatatatgtatactgacacatatctggaaatttgtttgtctgtaaccaaggatatctacatgaagtaagcatgagttcatgctgatgactccaactggaattcattactactgggaaattctaccctcctctctttggttatccttatgattccaatagtgagaagcctggcacacttcatttaccgtccattaacttattatataactctgatgtatatgcatttagtactatcagattttagggttctgattcttgctttgtattctcacgaaactaatatagatactgcagctttcttttgattattattaacatgttatacctttctctatttgtttagttttagaaaaaatactgcacctttatatttaaagtggggtgattgtgtaacacttacagcagtattgtttgtttactccctctgcagatttgtgtcttttaatcaatgtatttagatcattcacatttaaaatgactaatgatgtttttggatgaatatctacattgctgtaactgtttgctacttgttagattttttttttggcctcccccaccaccatttctgtcttttctcgttttcatgggacattttacaagcatcaatttgtgtcttttcttagtgtaagaattatacatcttttttaattttttagagattcccatagattgcaatataaagttttaaataattaaatctaagtttaaataatactatactgcttccatgtagtatgggtctccaataacagaacggtcccaattctcttacattcaacatatcacggataccattcagtttactttttcatataatataattactcattacattattactatattttttaacaagtatcttatagattatttaaattaaaaaatgtattttcactaatttcttatccagcatttttctttccatagtgcagatctaagtttctgactttaatcattttcaatctcaaagatgatttccttttaaaatttcctgctgagcaggtctgctggccataaattccctcagtttttgtttgtttaaaagtatctttggccgggcgccgtggctcacgcctgtaatcccagcactttgggaggccgaggcgggtggatcatgaggtcaggagatcgagaccatcctggctaacaaggtgaaaccccgtctccactaaaaatacaaaaaattagccgggcgtggtggcgggcgcctgtagtcccagctactcgggaggctgaggcaggagaatggcgtgaacccaggaggtggagcttgcagtgagccgagattgcgccactgcagtccgcagtccggcctgggcgacagagtaagactccgtctcaaaaaaaaaaaaaaaaaagtatctttatttcaagtatactttagaaaaattattttactggcttgaaatccaaaattattatattttcttatttcaacactttatttaactctattttcttctctcttgggcagtttctgaagacacaaccgtaattttatctgtggctttctaaatcttaagttccctctccccagcttcttttaagattttcttatttttttctgtaaatacattttttgttttgttttgttttgcagtttgaatagtatatgactaggtgaaactttttggtttttaatctttcttaatgttctctggggtgttatcctgtcttggtgttttctacctagatctcttgtttggcaactgtcattaattttgtaaacttcttagattattactttttttttatgagatggagtctcactctgtcacccaggctggagtgcagtggtgcaatcttggctcaatgcaacgtccacctcccgggttcaagcaattctcctgtctcagcctattcaatagctgggactacagtcacatgccatcacatccggctaatttttgtatttttagtagaggtggagtttcaccatattggtcaggctggtctcgaacagattgttacttcaaatatttcttctgttacttttctgtcttttctttcttataggccaatattcagaagaaaaccttttaaaattgtccctccggtcttcagtgttcattttcttttaattttaattgtttatttacttatttatttttgtaattgaattttagtttgagaagtttatattgacctacattcaagctcactcattccttttgtggccactctctgactcctgatgagcccatcaaagctattcttcaattttgtgagtgttttttatttcaaatatttctttttgattctttcttagaattggcttctctctatttacattacctacctgttcttgcatggtgtccaatactttgttagagcctttaaggcattaatcatagatattttaaatttcctatctagtaattccaaaatctgtgtcatatctgagtctgcttctggtgtatgttttatctcttcggacagtttgtgcttgtttattaacatgctttctaatttttgttgaaagccataatgtttcaggcaataggaagtgaagtagataggccttcagcattttagggctggccaggtgctgtggtcactcctgtaatcccagcattttgggaggccaaggcaggtggatcacctgaggtcaggagttcaagcccagtttggacaacatggcaaaacattgtctctactaaaatattaaaaaaaaatttagctgggcatggtggtaggcacctgtaatcccagctatttgggaggctgaggcaggagaatcacttgaacccgaaaggcgggggttgcagtggtgagccgagatcattccagtacactccagcctgggagacagagtgagattccgtctcaaaaaagaaaaaaaaaaaaaaagaattttaggctttaaaataataaagcctcctctgactaggagttagctgtgtttaatatttgcaatcatttcaggtgacaaaggctttaaatttgtctagtattatttttgtttcatctgtgaaatttgggtttctttaagctctacgctcagaaacagtctgcgtctctcagctcttttagctgtaaatcctgttataatactggatccctgttgatacagtgataaactgtgcagtaggagaaaaatgctataatcttgtgattaaatctctcctttagtggccctgtgaccttcataaataattctcattttattttatttttgttgagatggaaatctagagatgactggagtaaataaatgtaccttttcctggtaggataaggctctagctatatcttctcccctacagcatagacccttgttactgacaacaccgtgggggcatttcacaatatttttttcttcctcttccccaccaaagcaacagggtatgtctctcagctcttcatagttagaactaggaagttcagtgtaccccttcccaggggttcctgaagtgaaaaccggtgaaattttggtagcccgtatgttgaggatcccggagttttgcgctcacatttcagcccatattcagtcttcaacaatttgttaaaatttactattttattgtttccacaagtttagagctccaccagcttctgtttgagttcaacagatattggatatgggcctttggaatcatctatctctccagatttcaggatggcagttgccctgtgatctccgttctccaaggggtctaagaagtcacatattttccttatgttttgtcttttcttgcaaggacaagagtgatgacttgtaatttttgtttttacctgttgaaactgaagtcatgaaactatagtaaccttttaacattactatctcattattctccttggcattaataataccgaataagtatatagcaataattataggttctgaaaaaaaaatcaactgttttctttgtgattgagattaacatagtaagaaagatggggacagaagattttccttccaagaagcacgcagttacatttgaagacataaactgatgctcagacagtcaccattccaggagaggcaccataaactacaacatacagcataattaaacagagaaaattgatgaatcaatttaaaagagtagaaggtggtgctgctaagatacacatgcacacttaaatgacagttacaaaagtgtgcgtatgcttctagttgaattaagcatctgattaggtgattattatgttgatttaatttgctcaatttgtgtcttgaaagacaagatgctaattaagacattaaaaaaatttactttcacagtgctacaggaaaaccccaatttagaaaagtaaaaactttgctgttatattagcagtagtgtattaactgtctgaagaaatgaaagagaaaaataaatcatattttaaaaatgatatctgaaatagaatcgaagacattagatttttataaaagaacagcttgcccaagttctgtttttactgaacacaagtattttaaatctatcttcatgtttgctttttagcaaacatgtttaaagagcctgcttttattacaatttactaaattatcattaaaattaaccaattaacctttcaatcaacagcagatgctccctatctctatccatgattcatccatacagttaacaatttaacaaatagtctatttccaatatcttcagcatggaaaaagaacaaaacattatgtattataccatgatagataaataaatatgaattttgtaaattagaataggattaggcaacaaatataaaagaggaggcattcagcattatatttgtcaaaactccagcaaatttgctcaatcctctgttctaaataaataagaaaaccaggaatgaattgattgggaattgtggaaacaaaaaggtgaaactgcaagatagacttccgtataacacaactcaacaactaaatgatgttatcccagtggacttaagtggtgggtctctgaactgaagcaaacttttctgcaacaaattgtactccaaggcaggaagaggattctatttgtttccaagacaaactagactttcagaaagtttttggaagtatatcggtcaggatttagcctcaatataagaagaactcagatgagtaaactggggtctgagaagaaggtggtaattggttctaatactatcttattattttgctaaagtaaaaaacacatcaaaataaaaatgagtttgagcctgcttctcacagggtcctgactgagcaacttgtttgtatttcatacactttgtagacttaaaacagtgtcatataatctttagctattttttcaaatgtacatgaaatatcagtacattcaaattgttcggtggtttatctcttgggtataccaggtgctttcatacttctactgcttggacatatgggaagattcagcaggagtaggactatattactgcattcccatgctgctaataatttataatggtaatttataatggaaagaaatttaattgactcacagttcagcatggctgggaagaccccaagaaacttacaatctggcagaagaagaagcaaacatgtccttcttcacataatggcaggaagaagtgccaagcaaaaggagaaaaagcctttataaaaccatcagatcttgacctgggcacgctgggtcatgcctgtaatcccagcactttgggaggtcgaggcaggtggatcatttgaggtcaggagttcaagaccagcctggctaacatggtgaaacctcatctctactaaaaatacaaagattagctgggtggtggtggcacacacctgtaatcccagctacttgggaggctgaggcaggagaatcgcttcagcctgggaggcacaggtttcagtaagccaagattgtgccaccccagcctgggcaacagagtgagactctgtctcaaaaaaaaaaaaatcagatctcatgggaactcagttactatcaccagaacaacatgagggtaactgccccccatgattaaaaattaccttcctcctggttccacccatgacatgtggggattatgggagctactattcaaggtaagatttgtgttgggacacagagtgaagccatatcaatgaccaatgactcatgtaatacatttaagcacatcaatgtgatgtatgacatcaaatatacatagattgatgagtataagcattttttttaaatggagatgcaacctacagtgtgttaaagccttcaaatattatatgaaaaatacattttaatttcaataataagattagcaagtcaacttttgttaatacatcttccaatggcaatgaagttcatgcaccaagtggaaagcatattagcgcctgacactgattattaaagttagattctatatccgattacatttaattattcagaagctctgtagcatgtaataagatatcctcaagtataattagaagcacagcaatatcttttttaaaaaactatttgtagaatcttaacagcaattactatatcatataggtttttctaagctttcaggcaggtttttctaaccatttactgatttccttttatggatagatgagttttctgcttttgtaaaatcaatatataaaggcatctcccccctccagcaaaaaacatttgcctgctatataattaattataattataagctttataatgatctttagtctaaacacaactcacctctcctgtacatgaacattaaacacatttcttcaacaaaactgtacttaataatgtaacacaatacccttagcttcttttaataacattctgtttataacacttgacacaatgtgctcttcctgtaagtgaaacatgaacgctatgttcagtaagtaatactgtataaaataaacaacaagattatatttttaatattctggtataaacaaacttgcattcttataggttggaagaaagccataaatacaaggtttatggtattgattcatttttcaattcagatacatgtttactcttagcaataaggtaacttttcaattattcaacacattctcatcttatacatgttacaatattagaggtttgaccaagatcttactttatgttcttaattccaaataatgacttgaactacctgttctttgacaaacctaaactaaactactacttttgatgttaattgatttcctcgtcttatctctcccaaaggaatgcataagagcaacaaactctggtatttttaacacctatttttgtggtaatcctcatagcataatcctgctttgtgaaaatacaaaccagatattgctaacattaatcccttattttagaggaaaaaagctaacagataatatttaaaagattagcggagaaagcaatgaatttatttgtgatttcaatactgaagtctttgttactcatttttaaactatagctttcttgtagggagagcatgtccattttatgaatgtaaacctggcactctatctagatactccaaccgtgaaagccaaattacaatctccaacttctcaatacaaatccaccaatcatttgctctgcaatgttgcccttcacaatagtgatgaaacttccttcatgaaaacacttttgagtattaaaatttactttaaatatatatcacagaaatagacactttgtaaaggaggacaagagactcataatttgttaaatatgtttcatgactgtacataactggaaaattactgtatggatgtccaaaagtttgacttcaaatttgagaaatctaagctggtaaataacatattttagcataatttggcttgtttggaaaagttggtgggctggtatgcaaatgttgttgggaaaataagttatgttaaatcatcagagttctgttatgaagaagaagatacatattgacttcctaaatgtaagaagaagtataaactctgcaaatctactcagatagttaggggctgttctttttaaaatcctacttctttaattattggaggcaaggggacttaatgccaggaaatttctgtaaaatgtatggcaattctaggagcattgtaacatatattctcattctattcagtattaaaatacactactactattacagacatttaattaaatttggttgatgttggaagagtggtgtcgaatgttatattaaactatttcccaaattgcagtgtttatttattgaatttaagaggtattattatggaattacagctgcattaccacctgtgtgacttttgattgaaattaggaaagtgttgaaagtttgtttcagttatcagacaaatttttttatcaatcactgacacagctgtgatgaggcatacatacagcagcaagaataagagaaaaataaaacaatgatgtttttcttattttccttctcaattcttataagttacacatgagaaacattaatagggttatttgggaatgttatggagttgtgagtatttcacttcttaaggacatgaaatgtgtatttttaaaaatgtgaacactcaagtttgtttatggtgggaaaaagtgcagttttgtgattagtggagcatttagattgtgaataatacacaacaataagaatgtttcacttctttttatacccatttttctccacaaaagtaattctaaccttaaatggtgtttctataaatctgtcactgaatcaatatgctttaatggagataaaatggaacaggatgatgctccagtgatataatctaatatgtctttaattactttgaatttcttactactgtgatcaaaccatgccagcaatttaaatattttcattgcgtaacataaaatgctgtccatgcaaactaaagaataacattaattatattcttatatttaagtcttttccgcatctaaaggtactgaatttagcatgccctctagttgaaacttcagtactattacaacatagactgacgacaaatccagttttatctctctcctattgcacacccccctgaaacaagcatattaaattatatgaggttgaaaaatatctttatgtttgaaaatttaatattttttcacttgaaacagtgtaaaccttcaaattgtagccattgaagatgtattaacgtcatgaacttacaagcctgtgcaacatacccacgtaggcatgtgtgagcacacaaatgtggtactaatctctttgaatatgtcaggatcaaagaagttgcaacaaaagaataaggaagccagttaaacatttctggtgttcctatgtttgtttatttagttttcctcagtcctttttatgttgctactaaatcaatgtatcagacagattatagcctcaactctaatgattttgggtgtaatggaaagctttactatttcaatctggattaatttaatagcagtactcatgaggctataccaccttatttgaacctattgataaagtttcattataattgccccacatctatttcttgcaagagttccgcagtctgcactgttagtgcgggcaattatttattcctctgaaagtagaatgccgttgagttctgttttgatagttggctttttcttaatgtgtaaaattctctgtaagggcagatttacttgtgttgctcctgaaaacataatacaacagattgtggtgtccattaggtgagatgcaaaatgtcttcatttgatgcttaatacaaagtgaaattctttaaaaattgaattatttcaataaccaagtaatatggaaaaaatggaattaaatattttcgtttaatcatcaagaagctgacagtagtccatatgaaaaattgcttctaggacaagctaagtgtttgatgggagtttggaagaggcattcagcattttgttctcaaataaatgtcaacaatttagtattaatgcgtcccttaattatcaagttttcttttttttattagattgactggcatccctgttggtattactagtatatttgtggtagggcaactattagctaaacatgggttactgtttattgcattgaatttctatttattatgtagaaggaaagataaactctcacagctgattcatatatgtaagggatttagcaatatatattcattgaaatttttttatttacaatttgacacataattttcttgagttcttattctggctgtagtactattactgaatattcttcaggctaaatagaacaatttccatcccttgcctgcatgtactaactattctttcatgaaattctagtgcctatagagagttctcccatttacctcaaagaactcatctattttgcttagctcgactttgcttcaaaccagcagatttatcattggtagaattcaatgttaaatagtttgaacataaccttgaagtgaattctcttctttccttgtactcaattaccctctttgcgcttttcataaagtaaaggactgtgcaaagttgcactgtcagtgcagccaagacccaagtggtagaagtaggaaatgctctggggaatactgcaaatgtaatttctgcttcttgcttggaagtctgaagccagcaacagtctaatagaaaccctttgctttctggatgatccatttacagagtgataagcactgctgtggagttaatatcatttccagaagcagaccttttcatacagttaactatgtgtaaaattgtcttccttttcttccttatttgacgtatataccaaatttataaccagtctggcatgtacttccactaaacattctgatcttcctcttagtatttgatttatgatcacttgaaaaagaggtatgcctagaatgctttattacatatattttcttgatacattttgcttagttttttaaattctaatgagtctttaattttcaaattcatttttcttaatattttatcattctaaaatgtgaagtaatttatctgcttttttttcttctatgaacatactcttttagtgcttgtatattcttctccatagggcatcattttccttacccatacagagtaatgtactgttaataactctgtattggaatgaacaatactttatatacaaagtccgagtgatcctgcccacgtttcccttttgttacattgtgtcaactcagtttgttatcaataaatcaactttggaaatcttagcatactacatagtaaattattaacctcgttatttgcaaagttgaaggttattatcaaaattattccttttgagtaagccatttatgcctaggctagccaaatataaaagctgtatcattgccccagtgtggtggctcgtgtctgtaatcccagcactttgggagggcgaggtgggtggatcacgagatcaggagatcgagaccatcctggtcaacatggtgaaaccccgtctctactaaaaatacaaaaaaattagccaggcgtggtggcgcacacctgtaatcctagctactcaggaggctgaggcaggagaatctcttgaacccaggaggtggaggttgcagtgagctgagatcatgccacttcactccagcctgggcgacagagtgagactctgtctcaaaaaaaaaaaaaaaaagctatatcatttattaaattacaaatcgggatgctcttcacattgttaacattgatgattggatttgtttttatattggtatcaatttaatgcagtaactgttagatttttacaaatatgtgacacacatgtaccctggaagtatgtatgtttactatgcatcaatcgatcaataaataatcgaatgtgcgagatacactatttttgtttgtcttgtgtaactattctataaaaacagagcctgtggcaatggaaatgtgcagctacttactagttgttgagatctctcacaatttctatatcctcatggaaaatccttgcttaaagagagaaacttgtacttgaattcttattctgctactaacctaaggattaatgattcgctgaaacttacttgacttcaatatttccacatataaaatgttggccaaaatactacagtgattaattttgcctgtattggcaaaaagaaaaaaaaaagaaaataatcacataagcgccttaaacctaatgggaaattattgtcttgttgttataggaatacctgaactaagtgtggctccagagctatttaatgctgtgacttgtctgcttcatcagggactcactttgctttcacttttttttttgcaccaccattttaacattccatctgttttttgtttgtttgttttcttttgagatggagtttcactcttgtcacccaggctggagtgcaatggtgccatctcggctaactgcaacctctgcctcctgggttcaagcaattctcctacctcagcctcctgagtagctggaattacaagtgtgctccaccatgcccggctaatttttgtatttttagtagggatgtggtttctccctgttggcctagctggccccgaactactgacctcaggtgatctgcctgcctcagcctctcaaagtgctgagattacaggcaggagccaccacacccagcctccgtctggtttttaatttagtaacatttattgattcaacatgagatagcaattttgacattcaattttttgcttcctattttgtaaagttaaagaaacccttcccagaagccctacagaaagttcctaccaattactccatgaacagaactgcatcacacatttcacatctaatccagtctctctggtaggtgtactgaaaccacagtgcttagctgaggtcagtaaggacttgatagtggtggatgcccaaacaaactagagcctctggcagcagaaagtaagcagagatagatgctaggtagataattagaaagacaccctacaaatgtagtaagtttgttgtccatggtagaatgagtatatccgtaagtcacccagcacagtagctgtcacatagcgatgcttaaagaaaaaagtaaacttaaattactgcattctaccccaatatattgaacttctacaatgtttcaggtaccctgaagccactagcaacataaatgtattgaacacatttgctgaagtcaaacacctaatgatggacgagtcaaaaaatacagtatataaataaaacatacaaacatatggacatactgactcacaagttaatgatacggatgctatgataaagggaagcacatactgaaatgaacaaaaataagagagtattaatcacagatttggatgcaagagtgagaagcaagtgggagtcaaatctgagtgaatataatgatggtgtactttattctaaatgtatgtttttgccagtcaggggaagaagaataaattagattttctgggggaaatcctacactatgaattgtagggacaatcctactattaggaacatacaaggagaaaggatgattgtagaggtataggtctctgcttccggtcatatttggttagcagggaagggcttcatcctttttcaaatgtaacaaatttgtactgcatgtaatattgaaaagatttgtaattttggtaatatttcaataatagtgaaaaatattggcaaacttaaatttagaaaattctaagcaacattaggacacatggtatatgtttaacattaagttaaatgagggtattaaagatataaatatggtttacataggaaaatagtatattcaaggcaagaaaatatttttctattttgtttcaaccattttgtagtttttcttgagagtaaagattttctgatttctaagttattttgtagaaattggaataaatgccacagaggaattttggcctcataaagtatatcaaacactttatggctcctgtttcattttcgtacttcctagtccttttaaacacagcaaacacgccttggggttttccttaaagtcattttgaaagtgtgtttctgctatgacccatcagtatgaaatatggttttctgatagcatgctggctaaaataagttttcttctttttttcatagatggatggcaggttgtatatgttaggcctctctatgtgtctttatgtcaagaattcaaacatgttattgagaaatggtgctttaaaatgcaaacatgcaatataggttcaaaagatcttctaccatggaaggttatttaattatatttcaaaactaatttgaggttcaaaagaaacagaagccaaatcaactgttaaatttctatttaactgattaatgtatttacatgttataatgaaaacccaacattaaacttaatacttttattttacactttacatgtgacatacctgtctcaagctcttttcttttaggaagttctgatgattgcaggtcacgttccagtctatgtcatataatgtgttaacaagtaccacaaatttccgtagatcttgatgcagtggtgtgagattgcatttttctgtcacttactatatataattatcagctctaagtagccagttagtacttacataggatccagtggctattctttttctgtttcttgcactgcatgtggaaaggcattctccttcaatgctcatagtttaagtgtgataagctgtttgaaataacaaaaacgttttatttaagggataaacaaagactgtaacagcataatgcagaacaagaaacacattaaacacaggtaattagcaagatatacttaaatttttgacactgaagatgtcttgattgctttctttctcttcagatctgagtttgccaatttctgtttagcattccttttctactgagactcttatatcatttattgcccatattttgggccataaaacaagcttcaacacattttttagaaaaataaaatcatacagaatctgttctctgatgctgatggaatcaaattagagttaaataccagggaaatcatacaaaattttcacactcagaaattaagcaagatacttctaaaaatacagagattaaaaaagtcttacaaagaacaaaaaatatgttcgggtaaatgaaaataaaaagagaatataccaaaatttctgggattcaggtaaagcagtgctgagaaggaaatttatagcactaaacacttacatcacaaaggtggaaaaatcatgaatcaaccatctaagcttgcagtttaagaaactaaggaaaaaaatatatacttaacatggcagaggagatatcataatcacaaaggtagttttcccagggcaagccttatccactgcattccagatgtgctcacctctgtggtttccccaaatgtggaaaactggactgcataatttgtggtagcgggggactgcattaataccttcctctggctttttattttattttgttcatttttttaatttaaaaaatagtgagaaaagaagaaaataagcccaatgccagcagaatgaaggaaataataaagataataacagaaataaatgaaattgaaaaaagaaaaaaaaaacagaaaaatcaataaagaagtgaattttttaaaaagaccaacacagctgacaagattttagcacaagtgacacagaattttatatatatatatatatatatacacatataggtctatatatatgtctctctatatgtctatatgtctatatatatgtctatgtctatatgtctatagtctatgtctatatctctatatgtctatctgtctatatctatgtctatctatatctatgtctatgtctatatatatgtctatatgtctatatatgatgtctatgtctatatatgtctatatatgtctatatatatgtctatatatatgtctatatatatgtctatatatatgtctatatatatatgtctatatatatgtctatatatatatgtctatatatatgtctatatatatatgtctatatatatgtctatatatatatgtctatatatatgtctatatatatatgtctatatatatgtctatatatatgtctatatatatgtctatatatatatgtctatatatatgtctatatatatatgtctatatatatgtctatatatatatatatatttacccagaaactctgagacaggtcttcattaatgcagaaagtttattttgccaaggttgaggacacacgcctgtgacacagcctcaggaaatcctgaggacatgtgtccaggatggttggggcacagcttggttttacacattttagggggacataagacaccaatcaatatatgtcagaagtatgtaagaagaatgagacacaaatgaacatacgtaggaagtacactggttcagtctggaaaggtgggacaactcaaagcaactgaaaacaactcaaagcaaaggcagaaagaagcaaggaggggcttccaggtcacagataaatgagagacaagtggttacatttttttgagtttctggttagcctttccaaaggaggcaatcatatatgtatttatctcagtgagcagagagacaactttaaatagaaagaaaggcaggtttgccctaatcagttcccagcttgaattttccgtttagcttagtgattttggaggcccaaaatatcttgggggcctaagatatttacctttctctatatagataagacatagatatataatatatatgcaaatgcagatgtaacacacagtaaacagataggaagagaacactaagaacaagtctacagacataaattcagccactgagatgataatcaatttattaaaaagtacaagctaccaaaactcaaccaatataaagtaaataatttaaattcccttgtagcaattaaatcagttgaatttgtacttcaaaatttcttcccaaaatatatctccagttactaatggttgtgccagagaattcttttaaagcttagagaaaaattaacactgattttatccattcttctagaaaatgaatgaagaaagaacaatttacaactcattttatgaatccagtattacccacatattaaaatcaaacacaggcagtataaaaaaggaaaactacagaccagacttcctcatgaacacaggtgcaaaatatatagcgaataaaatatgccaatatataaaattgattatagactgtgaccaggggcttttattccagagatgcaaggctggtttagtatttaaaatcagtcaatataatccactttattaataaattagaataaaaaaatacataattttataaactgaaaaaattagaaacagaggaaaacctcttcaacttgataaaagacattataggaaacctacagctattatatttaatgattaataactatattttcttcttagatcaagaataaggcaaggatatctgttatcacttctcttattcaacattgtcctgccatagtatcgttcccattgattgaaaattaaaaaaaaactgccctatttggtaatgatatgattgtatatgtataaaattccaaggaatgtgcacaaaaacttcaataatgggccgggtgcagtggctcatgcctgtaatcccagcactttgggtggccgaggtgggcagatcacgaggtcaggagtttgagaccagcctcaccaatatggtgaaaccccatctctactaaaaatacaaaaattggccgtgtgtggcagcgtgctcctgtagtcccagctactagagaggctgaggcaggaaaatcacttgaacctgggaggcagaggttgcagcgaggcaagatcgggccactgcactccagcctgggcgacacagcgagactctgtctcaaaaataaataaacaaataaaaataaaaaagaaatattaattcaacaacttgtagtaaaatcactaaattaacatagttttagatcctgacatgagaaaggtttagttaagattaacaactgtgcaggggaacgcaaaagtaagaaaaagctattgtgctggtcccgaacttaaaagaaaatcaagaaattgcctacaggtccttagtcattccccatgcacatacacaagaaataaaagtggaggattcagaaagtagattttaaaaagaaaaccaaagcagaaaaaagattgcacagattgcagtgtgtaaatgatgccaaaattaccacagaaagtttggagagtactacatggggagatgctgcaaaatcctcaaaatatccaacaaaaacacctttccaagatgacagggacccacactgggaagaaatatctgcagaaaatagactgtctatttaactgaatagaaatattggaaataaagaagcgagagaagatgaagatacagtggttgtctagttgtctagagatttatatctccaggtgactacaaagagaggtttgatttatatatacatagacccatctagatgttttctatagggagcctactataaagtaaaggctcaggtagagtaaacataaaaaggtggagatggatataccaccataacattaataaaaataatcctatagttgctttcttaaattcagacacagtagagtttacaatacaaaaaattatcagtgacaaagaggggtgttatgtcatgataaatgggtcagtttttcaagaatactgtaaaaaatcctgaaggtatatgtacctaacaacacagtatcaaattatatgagataaaattggacaaaactacaatgagaaattgacaaattaattatcattatttgagacttcaatacctctctcagcaactgattgattaagcgagtagaaaataagaatagtggttgacctgaacagcatcatcaattaacttcatccaatcgacattgataagagtatttcattcaacgacaataaaatacacattcttctcaatttcacatggaacaatcagcaagatagaccatattgtggaccataaaacaccttaaaacaattgaggaatgaaaattatgcaaaatatgttctgagaccaaagtggaattaaactagtaatcaattacagaaagatagctggaaaatcaccaaatatttggacattaaagaacacactcctatataatacatggatcaaaaatgtctcaagagaaatttaaaaatatttcaaactattaaaaataataaaaacttatcaaaacttctaagatttagcaaaggtagtgcttaggaagatatttatagcattacatgcatatattaaaaaagatgaaggattgaaaatcagtcatctacacttccactttgggaatggagagaaaggagcaatttaactctaaagaagcaaaacaaaacaaacaataaaacataaagataacaagtaggatatactttctcaaacctcggccattacaatgtgtcttcttacaattttgaaactggggttgagagagtcagacacgtttgtttgtcacaaaaaccatcatcttgatcctcgtccttgtctcctcctactcctctcccttctccttcctcacaataaccaaggatatgaatagctgtaggctatttagcatgaccattttaaaacaaatgctcatattatctttctttaaaaacattttagttggaaactagaagcttacatttggatgcatctatctgttctgtgaaattctttattaaatgaacaacatggatcaaatttagttatatgagaattaccatgatgtaaccatgaaggaatatgatgatatttagaaaaatattacactagaaattgagctacctattctgaacacttcatattgtgaatgcaagaggatttttttttttttttttggacggaatcttgctctgtcacctaggctggagtgcagtggtgcgatccccgctcacagcaatctccacctcctgggttcaagcaattctcctgcatcagcctccagagtagctgggattacaggtacccgtcatcatgcctacccagctaatttttgtatttttattgagatggggtttcaccatgttggccaggctggtctcgaactcctgacctcaagtgatccgcctctcaaagtgctgggattacaggcgtgatccacagcatccagcctcaagaggctcttaaacactaaataatttcaacttatttcttggtcctgatcttccttaatttttattttgtcctatgatcttttatcaaaccacatgtatcaatatatgaataaataaataaataaatgcacatgtatgtttatatataactttgttattttgctactcttttttttaaaacttaaagtcctttatatcctctgaaattctaaagctgagaacttttgaaaaaaatctttagaactccataccagtatcattgtgtaaggcaagtacatagtacaatagagactaaggacaacctatatcttgaaatagcacctttgactaagtgtacagagatttcagaaccttatgataaaagtcattagcatgatacagattcttgattacttttgtttaaaaaaagctttgagattgtcttgcttagtgttctggccagctcttttgattagcttggagttaatcagttctatcttcattcttttagtaaagtaaaatgtgtttcaaagttccttttttataaagggcattgctatcaatgccagttcattttctcctgggaagctattgcaattttgctgtgctaaatgtttgcactaagcacttagtgaaggctgaggtcacctctcttgttaaagaagaaaaattgtaaacctttaactcaaagttttccagagtgcagtgtaaattgtaattaaatcctggaattaaaattttttatgacatagctgtaatttttatctttaccgttatctatttttgctgtgtggttaggtaaatattaatttgaaacagtatattatgacccagaaacattcattttattccattatggcaaatgcctcacaaaacatagtgatacagtaaatcagttttccttcagttgtcttaaaacaacgccatgtttcacataagcacatcttctatgaaagtgataatgaagtaattatcagtgtttgggttttcactaactgatagttttttaatatgtggggtagctaatactattgctgatagttcttaatagcagcgatgctatgataaatgtttgaaatacccatttaaacttcttatgaaatctatagtctgcttagtgttctgcatgaatgagttgtagtaacgttttacatttgatcatatgacacttgctgatttgatcatagaacgcttgcctcttagagaatgctttaatttctaaagtaaaaataattaacaacatttgtatgtagtaatgattaaaggaggtactatgaaataactttgctatgcagaaaatcattggcattaaattagttctagttgctttttctttagtacctatacacaataagaaatgtaaagatttagacagttctttctgggcaagaaaataatttttataaggtatattctctagaattagaaaataaaaatgtgaattttttttctgagagttgaatttttaaattaatatatttagttggattaaaaatatatatgttttaaaataaaacaatttccaggcaactgtgctgggtcctaatctgaaacaaatgcatgaaacagaaatgtatggtagagtaggggaactattcaaccagaaaattgtggaaaagaacaagcattgttaacattcatttaagaggacctttctaaaaggataattcaatctattgacttaaacaaattggcgtcactagctggccataccctatgaaggatacacatgcatttatgtgacttagcctccaccactaaatatgaaaacaggctaactcaatttgcttacatacgtacacaccaagcaacctattgctccttttaggaagcggatgagctcgtcatatacgtgtgagattggctgtgccagtgaactttacttctcacagtaaaaatattttttaaaaaagcattctgatatcatagagttttgattttgtccgttagaaaagactgtgacactttggtgctgctaaaatgttaggactggtggcaagaacacagactgtggtaaatttgttaaaacaacgacaatgccactgtgaggcttcttgagaatcatgccacagatacgaacaaaggcaatcattaggtacctatgtacacatggttcgtgacaaaaatacacctaactctaacatgcacacaattgtgaaaacacagaaaaatctcctaaggacaaaaagaaaaaaaagcaatattaacaaagtggtaagcaaacattgttacctcactagtcctaatatgatttgcagatctctgcaatctattagctcttagtggcttggttttaggttgacaaggcctaaacttcacacaagcttgtgcactgaaaatcagacacttccataaaacttgtgatcttgaaatctatctcctcagtcagggatcaaaatagaaaataaagtggctcattcagcaaagggggatgatagagacaatactcacaaaatgtctcacagaaacaattcttaaaggatgtcttttagtgaaaaagattactaaaaggagggcacaaaattgaacaataaacatttctgagaagagaaattgaaaaccatgtgaagaaatccagaggttgactatttcaaatattaatactgcattactatttacttagagacagtaaaaataaaatggaaattaaaaaaaatttaaaactcacttgaaggtgtgagtgtggtgcctgatattatcctttgtaaagtttttttatttatcttttttttctttttgagatggagtcctactctgtcgcccaggctggagtgcagtagtgagatctcggctcactgcaaccctcacctccagggttcaagcgattctcctgcctcagcctcccgagtagctgggattacaggcgcccgccaccacggccggctaatttttttgtatttttagtatagacagggtttcaccatgttagccaggatggtctcgaactcctgatctcgtgatctacctgtctcggcctcccaggtgctgggattacaggtgtgagccactgtgccgggcctgtaaggttttttgtttgttttttcttccttttatcatataagaaatggacaaagatatgttttaattttagattttgtaagactaggcattcagtttggtattttgggttaccactaaaaaatgagaagtggagtatattctttccaaaccaaggaatgagaaaaaatcattttgaaaacaaaccaacccaaataaggcaaaacaaaacaaaaaaaaaccctcaatcaaaaagaacgaaggagaggaggaaataagaacggaacataagcgattttcttaggtccagttgcacagaagctgatcttatgatgaatattcctgtgtaagtgatattctaaatatcaaaggaactctgtttaagtaagtgggggaagcaagacagaaaaaggaaggaaaccaagcaaagatctgatttcaagcaaagccttattaaaggtatcttcaatgtaatctttcacgagagctctggggttgtaagttacacttcagtaattcccaggtgctccgagctctgtaacagcaggcagagtgtgctccaatggcctgagcatagtcctccaaacagtccttcaaacaagctgcagatgcaggctattgctaaatccaagggaaaacacaagagctaaaaaggatctaagggaacctacacaaggttcaacatcatctgcagagacatacaaggaaagtgcaacataacatggtttaaatatttcaagtatagtgaaaatcataaatatccaattgtcttaattatccagtgaaaagcagatattgcaaaattgagttgaaacaaaaatctatgttgggtttaatataaatgtatattctatttataagagattcacataaaatacaaggatacagaaagattgaaagtaaaaattttaaaaaattaaaatcaggaaaatactaagaagttaatacagctgttaatatcgggcgaaatttactgaaaccaggagtattattgaggataaatacggtcctcagataataattcagttaactaaaggataaacaaaaattattcattcttgttaaaaatgtgctcaaaaatatatgcaacaagtgacaggaccggataaaaagtttacaaattcacctcaatagaagatttcttttatataaatttttaataatgtaaaatatccgtattttaaaagtatacaaatttcaagtttacaatgtaatgaattggcactaaatgaacactgccatgtagagcaagtagatgatttcatgcaaagctctaggtaaaaaaatagaacattaaaaatatccaggaggcactctcctttatttcccagaaatatccacccccccaacaatcatttaattgttatactgacatagcaccattggttcacatcacttgtattatattttttgaataaaaacatatgctgcataccattattttgtttggcttatttttttcagtaatctgtgggattaatccatgttgtagagtgcagaagtttcattgttctcagtgttgtacagtattctgttatataaatagaacatttatccatgctcctattaacaaatatatgtatatttccagcgtttttctattactctattataaatacagttgttataatcacttctgtacataattgtaaagctgatatacaggcatgcactgctagtttttaggatgtgtgtacatttacctttagttggtatcattaagcagttttggaaattaaaatttccaccagcattgtatgagaattccgtttgctccatacccttaccaacacttagcattgtaagccactttatatttaatcattctagttggcatgtagttatatagcattgaggttttattttgcattcccctacctgttaaagaggtaagcacttctcatgtgtttattgttaatttagatatctgtttttcggggaaggaaatgccattcaaagattttgcacatttcctaattctctattttccttgttgaatttgagagtcattacacattatggatactggagattgatggtatatgttaaagctaacttttaccacttcgttcatagcatttttcatccccttaaaaagtgtttgatatacatacactcttaattttaataattcaatttattaatttgttttgctcataattttttacttctcatagtttaagaagatactctaagctttctgctggagaatgtacaattttaaagttaatattttgatgaatatttaattaaattattcaattaattaattttttaagacacagggtcttgctgtgtcacgcaggctggagttcagaggtgtgatcctagctcactgcagcctcaaactcctggccttacgtgatcctcccaccccagcctcctaagtggcctggattacagatgcacaccaccatgtccaactaatttttttccatattactttagaaacaggatcttgctatgttgcccatgacggtctcaaactcatagcctcaagagatcctcctgcctcagcctctcaaggtgttgggattacaggtgtgaatcactgtgcctggccacaataagtatgttatactcattccactcagaactgatttcttttggtaggaagagtgaatattgttttcttagttgagaaattcacctgactctttccccactgatctgtaatgccaactttgttatgactcgtgtccatgcatatgtgtttctatttctaaactgtattctgttttagttattagtttacccttgcatgagtagcacatttttattacaactatagctatttactattaatatctggtattataaatcttctaattgtttctacttcaaaaactggctcatctcggttgttatttccctttgcatttccacttacaattttctatcagcttgtccatttcctccaaaataaccactaagcttttgattggtttataataagggtctacatgtctattcgaaaaaaatatatttttaaaaagttgagtttcttcaatttatgaacatcttatgttcccctattatttacacttcctttaatttctttatttttttatatcttcatagtggaagtactgcacagttttcattagatttatgggtattgatttttatgctatttcaaatggcattgttttgacattgtaagtttttattggtatatagaatatcatttattttttaaaatttgatttttatctcagggaactcctttaattcacctgtttttaattgggtatatgtcatgtttagttgtgtgtgtgttttttttttgtttctacatattcacaatcattttgcgttaaattataataggtttagtactccttttgtgttccttgtattgttattttattttcttattttatacttcttagtaaaacctagaataaaatattgaataaaggtagaaattacaagtatttcatttcatttctgtcatttagagtaatatttttaataattcataatcaagaatgatgtttttgccagatgttatgtaactactttacatgaaacttagaaaatttctcacagccaaagcagttctatgagggatgtttacagcattgaatgcctacatcaaaaaataataaaatctgaaataaatagcctaacattacaccttaaggattagtaaaacaaggacaaactaaatataaagttagcaagagagagaaaataacaaagatcagaacacaaataaataaaatagagaccagaaaaataatagaaaagataaactaagaattgcttttttgaaaagttgaacaaaattggcaaacctttagctagactaaaaaagaagactcaaataaataagtaaaatgaaaaacaaaacatgagacatgattattagtaatatataagacgctacagaaaaagagaaaagtacaggtcaatattattgatgaacatagatgcaaaaatacttcacaaaataccagcaaaccatattcaacattacatttcaagtatcattcaccatggtcaagtggaatttagccctgggatcaaagatagttcaaaataagcagacccattaaccaccacattaacaggataaaggacaaaacccatatgatcattgcaacagacagagaaaaaatgtttgacaaaatgtagtattttttcatcataaaacctctcaacaaaatagccttagaaggaatggtcctaaacacaataaataccatatgacaagcccacagctaacatcatacttaagtatatatattaagtatacatataattaataattaactaattgcttgattctttgtgaaattgaacttagaccttgtccaagcatattatatattcttaataattaagtatatagatacgtgataactacttaattgcttctttgtgaaattgaacttggaccttgtcattgactagttctgtgatattaggtattccctcatctgccagttttctcatttgtaaaataaagatcacaactatagtcatatcatatgcctggagttaatattaaatgacatatctatctatctatcatctatctacctatctatctatagcatttagtacacagcttttgtttcctgtacttggtagcacattttcctgtggttttctgtatgccaaacaggcagagaggggaataaattactctaaccaacatcttcggttaaagcatgctcattgttcattgtcttatgaaccatgtagtcaaattgtcatcacagcgtatctgaactagaggccagatatctcaataaaaaacaactttcttctaagaggtgagcttataaactatgacactactttctagactttgtttaccagagttgtaaatcaaggaaagagatttaaaaaccactgtgagattgtgggcaaggggtaagcgagtggatattgtgatggtccaatgcatttctctgactgctggtatcttgataattattggtctgaagaatctgtaggcagtcaataaggatcaatcaaccattacaataaaagaaaaaataatttaaacagagctttatgtagagccactttagtaccttggtcagtttcataaaaccaggcaatgaacagaatacaagtattgctaatcaaggatagtatttctgtattcacatcaaacaatttattttaaagaatgttgtttacttgttgaagtcaattaaaaatttatatatccaattaaactaaatatataattatcatctctcacaaaccaatgtagaatttctcttaattctatgactgctattttagtcatgaagctacagagtcattatgcaaggctgtgcataaagatcaatggagcattgctatttcagttttgtgaagacaattgtgtttaatggaaagacaaatttacagaaagttattcagtgattccctacagatttttagttttaaatttatttttatttttattttttgagatggagtctcactctgtcacccaggctggagtgcagtagcgtgatctcggctcactttgacctatgtctctcaggttcaagcgattctcctgcctaagcctcctgagtagctgggattacaggcatgtgccaccactctagttttttctaatagttggcacaatttttgcacagctaatttttgtattttagtagagaaggagtttcaccattttggacaggctggttttgaactcctgacctcaggtgatctgcccacctcggcctcccaaagtgctgggattacaggcgtgagccaccgcacccaacccagatttttaaatatcttttcctttttttcctcttctgtgtctaagcacaaagaaaacatggaaagtctgagacagagtaacttgattagattggttttggaaaacaattctatgtgacttattttccactaagcgtcaaaaattcaaaaagaaaaggcaagcgtttaaacatctccacactgtgaattatatatattaaacaaacaactctgggaaatacctcccaaagtaagcaactctaagagaacaagaaaaaagtaggcagtttacagtcaattgttttatatttttattaaaatgtcttctgtcttttggctaaacccaggtaaggaaatccaaacagaaaaaaataaaaatatgacaaaaattcaaggcattcagtgtgaaaaaaaaattctgaagaagtaaattcttataattaagatatacatttgtaagttctaaatgcgctgccagaaatatggttttgtggtattttttttgaaattattaatctcttgttaatttgacattatcattatccatgtcttcctataaaatgatctatatgtactctaaatgtttcttcacttaaaaacgtatatttttatatttttagttgaatttgaagtattacaatatttagtcatctctaaatcacattcagtgtcactgccagttcttatttagcacttacggaacccgactttgatgtggtgagtgtgtgagtgagtgtgtgcatgcattgttattaacataaaacataagacatgttattaacataaaacataaaacatgttattaacataaaacataagttttattaacataaaacacaagttaattgaaacagatttaatttgcatatgcttaaatcataatgaaaatatgactctaactttctcggatttctgttatgtacttctatttagaatttacagttttgtacccaaatttgcaaagaattaccttatcaacttgaaaaataacaaatttaattttgcatataaattttgcatttatccacttgtaaatttcattttcattagttttttgctacttcaaactgttctaaaaagaagaaactattaaatatgtagtccatattggtagatttagataaaactaacaagatatcagagaggtacaaacgttatctagtaaaactagtagttcacatgctttgcattttgttcttgctgtctcctttaagtgaacttctgctaaatcataatcttacaaagtccaacacatttttctcccatggcaaaactgaggaacaaataaacacattgatttttccaacattgtagatcaatcatttctcagcaatgtttttttcatttattccaaaatcataaagaattctgttgtaaaaaaacatccactgtttttgttagtggttccttcatgaaattgaaggtaaggacagttggcatcaaaatgtaatgaatacatgccttgaagctaggatgaatcttcataagtttgtctcctcggaaacttaaatttactcatgtattggaatgatacagtaatacatgtctttgtatgattaaattgcataaggctgtaaaagatatattatccactctcctttgaaactggtcattcacaatttataactgtattctataatttagtgaatatatttatgttatgattgaagccatgtacttactgaaattgggtacaagaaccagattttagttttatttaatccaaccaattattggccctgtccttatggtttccttttttatccataattgttttcctccagtcagccttatctaaggtactaatttttatttgtgacattgaagttgtagttttggatatagaaatatatttttttattaaagctgtgtttttcttagaatttgcccatttttgctgagtgacttttaagaaaatattttaccttttatggtctcaaaagaaaattttatttaatcctaatgccttaaatgtaaaaattaaaacagatacataaagtgtgaaataactcaaattttagtgcttcaaatagattaaagcctatttactataactcatatggtcacgccatatgcccatggggtatagatataaatttctaccacagggaaaggcagtaacaattttgaacaattatacaatctaaatagaaaaaatagaataatagaaaaatatttaattatgtagattgaacttaaggagtactggtgaattgaaggggtatcacgagaggtgtataatatttatagaggaaatgggagtgatgggactagtaaaagagacaatataggtgagaaaatgagaataattagggattgatttttttctcattattactgcactttaaagagaacaattttgcattggtaattttaagtaacaatactttttaaaaagataactgaataatggaatacattagtatgccttggttgtaagtcaaactatttttttctaatatttggcacaatttttgatgttcttggttgcaaaagaagagaaattttctgaaaattagtgaaactttttattaaggttgaaatttatttcttagccatatatttttacatttttcataaataagcagaagacctttatagaatttaaaggtttttggatattctggatagtcacatttctttgaggacaattttatatgtatgtctcaaagtttgaacattaggaaatcacttttcacaatcttccttccctgtggagtttatctgaatgcacagccatttttaaagtttgtcctctgatcagttcagctggatacttacgaagataagagtgtagcacaagttaaagtcaaaattctagaattcacagtatgcttcaatggactcttttttttttttttattgattccgaaactcttaaactactcattggatctcattctgttaactacgttttactattttggtttccataataaaccaaacgtgaagtctttgaaattacttgaataaaaactttatatatcaaatagtccaaatgggcagaagttggtatgtatctgaaactacttaactgtgtataaaaataagaaaaattgaaatcggcaaacaatgctataaaggacatttttgtaaagttagctattaagacgtgtttgtcaatcccagaccaatgatagaaagtacaattttatacttaaatatatattaattgtctctatttgtgacaattaaatagagacaatttgattgagacaattaattatctctatcaaagtgtattctaaaggtttggtttttttaaaaagcaagctcaagcattttgtccaaaagaattgtatatctaatggataagcacatacataatctattggtgggataatcagtgtcattgaatacattcatatttgagtttgatactataaatattaccccccaataggtagtacacttatcagaaatgcataagagtacattttgtttccccttgcactatgcattatcaacttttattttttggcacatatgatagtgacacatttattttactcagattccttgagaagcaattgttccaaagcacattcatgttgatgttagtccctgtaggttggctgagtggatctaatctagaaaacattcacatcatttctatgtatttttttgctctgttgagcaaaggagacagaaactgagtagattggcctgcactgtaaactcaggcttgttttaaagagctgtcccaaggatgacattgaggagagagaagcttgcaagtcactttgtatttttctttaatctacaacccacaactttaacagcaataaagttaatattttagaaattaataattattctagtttattcatcaaaatttcagaaactgtaagaagactaggagttctctttatctaaagtagtcttaaaacgcctaatacctactaattgtaatttaaattcagtgattcttaaattactaatggagctggagacataattatacattaaattgtctcagccattctttttttgtgtgaaaaaaagcccttatatttttctatagtttgtttagattgacatttatttctcttttttcttttttttttttaatttttcttttaagtttagcagtacattcgtttgtttggtttgttacataggtaaacttctgtcaggggttcacagtacagattattttgcatcccaggtattaaacctagtacccatttgttatttttcctgatcctctccctccttccaccctccaccctctgggaggcctcagtgtgtgttgttcccctctatgtgtccatgtgttctcatcacttagctctcacttataagtgaaaacatccagtatttggttttctgttcctgtggtagtttgctgaggagaatggcctccagctccatccatatgcctgccaaggatttctttcttttttatgtctgcatagcattctacgttctatatgtaccatattttctttatccagtctagcactgatgggaatttatgttggttccatgtctttgttattgtgaataatgatgcaatgaacatttgcatgcatatgtctttataatagaatgatttatgttactttgggtatatacctagcaatgggtttgctgagttgaatgatatttctgtctttaagtctctgaggaatgattacactgtcttccacaatggttgaatgaatttacattcctaccaacagtgtgtaagtattcttattattgatattaagtaaattagctctttcatcattctatgtattaaaatgtttgctaatttgctatttaaatgtataatattttaataagcattttataacactaagttaaaacttgtgactaaaatctatagaacagttcctactataatgaaggaaaaataactcagcagaataccatttttactttacattctgtattttagcttcaaaaagaattcatttaagttcatgaacttgctgaacatttcatgtattagaatcttctatcactgatattttgaactttagaacattagatacattttccccatgaaaatgttttgtaatatttatagatctcattaaattattgtactatactttatagaaatggaatctgaaaatgttggcagccatccatgaggcactttaacatataatctactcaagttttttcttcaatcatttttatcattaggctatttataatgagtaacatatagttccataacctaactgtataagctatcattgaaccaagtttagttgatgctaataacttcccatgattcataatgcaacaaatatatttgagtaagaatttttaaggtcacagttatcttggttcctagaaaatttttttttcattttccaataaatggaaatgtcgcattattcctcttctaaactacttaaataacttccattgtttctgatttacatatttatgaatcaatccctattacatgaaaaacaaacaaaaaacagtatggcaataagtaacctattatttaatcctaatttagccatctgaattgtgtagtaatttttattgtcttcaacagatttgtttctgaagatgcattggaaaactactgtttacttctggaaaaatagaactaaagaatttttaaagtaaataattttctaaccagtgtttgtaacacttgcaccaagcctatcataagcgcacaactatttatctagtaataaatgaatgggtactcacatcaagtgacttctttattacaagaccttttatgaaccctcttcaaagagaagatcctctaccttttgaaaaaatgcattcaaaagttagaatacagaaggtagatagattagatagatgatagatagatagatagatgatagatagatagatacacagatatagattaatatttccattcgtggtccacaaagggaaaactcatgaggaacaaagcctaaaatattacaacccaccaagcagagaatcactgtggtccaattctaatcatcctgataaacagggtcctagatctgtttctaggtggctgggacaattgtactcgcctatgtttgaatttggaaataagctgattccttacaattttaggtaaaaacagttactacaaaatctaaaattggatctttgtctcttgttaattcaaggctgaaaatgaactgagtgtatgattcagagcccagagcttagctgctaacacaaaaccagcttaagagctgtgaacaatgaaaaaccaagtcatggaaaatgtttgtgtcatctcactggcaaaccttcgggaagagaatcctagcagaaagtgaactgttacattaaaacattcaaaacatgtaaggaaggtaaccatcatgaaagcagagacaaattaaacgaaatagaaggagaacaaatcacattcgattatcttaacaaaaattaaaacaagcagactttaaattcgacatggaaacataaagtttccaaaagtgttaagtcaattttaaaaacaactattagccaggcatggtgtcgtgcatctgtagtcccccttactcgggaggctgaggcaggagaatcccttgaaccaggtaggtggaggttgcagcgagccgagattccaccactgcactccaccctgggcgacagagtgagacttggtctcaaaaaaaaaaaaaaaaatagaattgagagagaattgtcaatgcgctatgtcttctagacatcaagccattaaattgtaggataatttattatacagcaatagataacttatccgccaagagtctcacccttgttttaaattcaagattctagtcttcattcctgtccactagttcagctatttgttttggatattatttctctttatacaatcactacacctaaagtaacctctagacataatattaggccaatggaatttcttggcctaactacatactttatagtggcaaaaagtattttatgaacattttaatagaacctccatacgtttggaaataactatttgaaattttaattatttcaaaagcaatcatttgatggtaattatttctgaaaaagcatctagtctcacacagaaagacaattttcccatcaaccagtttccatttatataaattacaatttccttaataataaaatgatttatctaaatcataaaatgaaacactatcttgccaatagttgtatcaatgtcttattatactttgcatatgaaagacgtattctgtctttgtttctatttctgttgatatccaccacaattaatagtgtattttaatttaaattaggaaattgtattaatagacagtagagtaatgcattattgacatgcatatatattatgtttaaaacttttcctttgttatttactaaaacttatgaattatttttaaaatctcataagcaatacttagtagcatctgaaacatgttatttatatttttatgatgcttataactgactaatatagactaaaatatacaaaaatctcaatggtgtatcaatttggaggatgtgttcttaattgttcctgttttaatgattatggatgcgaagtgacttactgaaatttccttattcagtctctgctgatagcaatggaatgagtttgtgagcttgatgcatactatattctggtaacacaagaaagcaaatagcttctttgtaagttaaacttttttttttcctggcaacactggcatggaaaccttatcaaagaattagctactcacagtctgtaatgatcaccaattctcaatgatctatactaaataaataagaatatcagagaggaaatgtatatatgagttaagtttttatccacttttaatatatgacaataaatgcaaatttgtgaaagtttttaaagtgcagttttataaatattttaattatttttcaaaatgcccttctcgactactagacaccaataattcaagctgtttttcataaaagaggatcaaaagcacaaattgcaaatttattttcttggaatctacagtctatgaagatagaaataactacaaaaaaataccataaggaaaaaaatgtttgcacagtcaactagctaaataaattatttactaaattcgacagaaaaatgttttgtttttaattaatctaatcccttattggtagaaagtatgtttttcatcctactacaagtactaaaattgcagctaatattttatggaaataaattgcttggtattatagatatataaaatataggtagtctaaaactatgtttaggttacctattttagatagatagatagacatatagataatcatcaaggtgcctatacaatttattattatgtatgagaaaatattatttaaaaatctctatttttaaaattttttttaattctaaaattgtgtgaatgaaatggcagtccctgttgagaactacagtctttctggaaaggcataacatttcaaaggctagaaaaaagttcttccaagaactatgtggcctttcaaaggcttctccatctcagtgacaaactggtaacatccatctgacactactgtctttttgttcttcataaggctggttacaatttacttcagaaagacaagaagaactgtttttcacaatggctgcagtgaaagagacttgtgccttttatctgtcttttttctaataagataaatggagcaggtgtagaggaattaatgaagcaactgccaaattgcaagggtcattggtgtgttgaaagctataaattagccaggtcttgcgggaaattaccctctacctttattgagattctgccatttctaaattcaagttcaagacaagacaaaaagctgtttgaaagtggaaaagaaaaatgccagttaactttcattatttagggtaattctaagcaaaaacacacacaccagaatatatatatatatatatatataaatcactgtaaatacatataaactgtaaatctacctatgtaaatatggttaaaattttacttactgtatagaagaaaaaagtttgtgctttgttaagaatatatatttctattgatggcagcagtttaaaactactaggaatacaatctacatccgtgtgcacaaatttactgatttgttaaattcatattaaatccaatgttttgcaggaaattgttacagtataaaaactaaagatttaaagaaatttgattttaaatatgagttcacaagatatacttctctcactctgtgctccagactctttctcattattaaatgaaatgttaaaggaaaagtgctatattttaaaaacacataagagataatagaataacagctcaagagaatcttaggaaatcttttgaaacatgttaaatttttatttatttttaaagttagagaaggacaaaacaataaatctaacgcagttgtgttgtaaggaaaataatatatttgcactacaggtgcatttgcaaattatgtcaattcttatgaatattctgccattgcaagaatctaggattttggtaaatagtttgaatatacatacattattgcatttcatacgttgatcaatacggaaaaaataaaaaattatattgctaaatcatctcatcagtaaagaattaaaactcttcatttactcatcatcttctatgtatagcagtgaagttttaaatttaccaatcctattaacttaatgttttatgcaacagttccttcaacatctgaattttccactcaccagtttggatcccatatttcataattctgagactttacataacagtacaactatcttgtcacaaatcactcttttaatgatgcaggcttgaaaaatcccaattcatgtccacagcagggcagataaatgtgggtgaataaaatctaaaaacttgttgagtagccttattttgaatctagaaattataacaccaattatgcccctgctaattgattggcatcaactattcttgttaattttactgtatttctgcaagcccatttacccttccattcccctatacgctcctctttccttttcaaatgcctccaccttgagccttgttctcaactgatgattgtacttcctgtttgaccaacaagatgtaaaagaataacaaaaaaattgtgaatgaccccaccaaccctttactatcacagatttgtttgttgatttaccctcatttctcaggattcaaacattggagcataacacggagccatcttcagtcttcatcccttccaatgtttcttgggtagattattttaagtatcatttggatgctagtttctcctcaattttataagctgcctagctttcctccttaactgaagacatatgcatcaagtgccttttcaaaaagtccccttggacatctaataggtttctcaagctttacctgttcaaaatgaaagtcctaattttttttctcacagtaaccaactcctttggcattcttcttcttggtaaattacacttgcattcagtcagttacttaagctgtagtagaaactggccatctgactaaaccatttcctcttgcagaaaatacaccacaatttccaccgtggtaactgagaccatgttactaattctagccactagaatgtgtacaggagtgatgtgtatcactgtaagtcctagcctgtaaataaacactacttgcagtcctccttattcctttctgctcttgtggctgggatggagatcatcctaggtcaaacttggaagccacatgcagaaaaggaagagccataatatagaaagaggtgggactcctcattctctgcttgaatgaggttttcctgaccaagaaaatacagagcagattaatatgtgtgcaagaaatgtacaaatgttatgtccttgatattgctagaatttgtttcagaaaatagaatcatcatgcatctcaaatatattgaaccatcataattctttgtattgcatcttcatttattaattatattcataattcagccatttttacaacttctctgttgtaagagatcatcctgttctgactgttatgactcaataggattactccaattctgcagaaatacttttcttgaaaacacatttacatcctttctcctattataattttgttttgaaatgattctgttaaaacttgccagataatgtcacactcctgctcaaaattatacagtgaattctcttctcaaaataagcaacatagatttatatgaaatttctctccctcactaccactgtgaccttctcttccactgttttattcctcacactctgctgaaattctgtgaccacttctagatcttctgatttactcaatgtagtcactcatttgtgtctttatttcacttaatccttctgcttggaaggcttttccgcaagatatatgaaaagctttcttatcccattcattcagcacctactcaaagtttggagggttagaatataacaatgcatttatatctcttattttagtaatttctattttgtggcatatgagctgttttcactttttatggttttataaacaatgcatgtccatgagcatatgtgaatgcttttcaatatagcatttaccaaagtttacatgtattgtcctatagtttaattgcagagtgatgagatatgagatggttataatatgccagacaatccaaaatgatagtaccaattcttattcccagcagatgagaattccaaaattcaaactatttacaaaaacctagactgatccatttttatttttttaacttttgcattttttcttataatctaatgaatgtggtcttaagtatcagttccctggtcattaaaacatttggaaaagtttttatacatttatggaccatttatgtgatctgttttgtcacgtctgttccaatttttagcttattttattcttgtggtattctatctattctatcaactgtatgagtttcttttgttagtagttatttatgtggtataatagttggatatattttccctcaagttgtagttggtcttttaaattttgctgtctctttatgtaacacatgttaagatgttaataatcataaatacttagtttatcaattattgtatttttgtacttttcattttttgtgttctaatgcattctttttctttttgatctgaagggcttattacatttattggcatacaattttaaagtatcatttatctttaaaatatctgcagcaactttaaatgcgccttttttccactactgatgtttaaaaatattttccattatctcttaaatgtaaatcccaaatctatacaaaaccttaaagaaaacctacaaaatgccactctagacatagattctgggaaagattttgtgatgaagatgccaaaagaaattgcaaacataaacaaaattgggacctaattaaactaacggacttctgcacagcaaaagaaactatcaagggagtaaaaatcctacaaattagggaaaatatttgcaaactatgcacctgataaagtctaatatccacaaactataggaaacataaattaacaagcaagaattaaacattaaaaatattaaaatgcccattaaacatagaaaagaacatgaacagacacttttcaaaagaagacatacaagtggccaacaagcatatgaaaaaaattctcagtatcactaatcattacataaatgcaaatcaataccacaaggtaccatctcacaccagcagaatggttattattaaaaactcaaaaaataacagatgctggcgtggctgtagataaaatgaaatgcttatatgctgttggtgggaaggtaagttagttcattcacggtggaaagcagtttggagatttctcaaagaaattaaaaacagaactaccacttgactcagcaagataattactgggtatatacccaaagtaatataatttgttctgccacaaagacacatgtgcacgtatatttattgcagcgctattcacaataacgaagacctggaatcaatctagatgcccatcaatggtggactggataaagaaactgtggcacatatacaccatggaatgctacagagcaataaaaaggaacaaaatcatgttcttttcagcaacatggatgcagttggaggtcattatccagagcaaattaatgcaggaagagaaaaccaaacactgtgtattctcccttataagggggagctaaacattgagtacacatgcacattaagaaggtaacagtagacactgggccatacataagtgtggagggtgggaggagggtgaggaatgaaaaactactatcaggtactgtgttcattagctggatgatggaataatatgaacaccaaaccccatgacacacaatttactaatgtaacaaacctgtaacaaacctgcacatgtacctcctgaacctaaaataaaagttggtaggggaaagaaaaagaacactttccattgtgtcttgtctgcacagtttctcttaagaagtcagccatcagtgaaaacacatattttctcttagctatttttatgattaaaaaaaaaaagaaaaaaacactttgattttcttttccttttttttgagacagtctcactctgtcactcaggctggagtgcagtggcacaatctcaactcactgcagccgccgccccctaggttcaagcaattctcctgcctcagcctcctgagtagctgggattacaggcatgcaacaccatgcctggttaatttttgtatttttagtagagatggggtttcctcatgttggccaggctggtctcaaactcgtgacttcaggtaatccatcctcctagggctcccaaagtgctgggattacaggcgtgagccaccacgccctgccaaaactttgattttcattaattttttgtttctttgacagggtctcattctgctgctcaggctggagtgcagtggtgcaatcttggctcactgaaaactctttgagaaaatttaagtgttttttttttttaaataattcattctatagtatgtttactgaccctgaatcaattgtttttctcatctattacctttttgaatgctctttcatcattatctgttttttttctattatattttttctcttgcttctttaggttgggaaatttttagcttgttaatttatattttttatgtgcccacttacagttaattctatacactagctaatttcagatattgtatttttccattctataatatggcttaaatttctggaaaaattctcctttcttttgtctattttagccactagtcattatctatattttcaccatatttggcacagttatagtcagttttttcttgctattccaatttcttgacaattttcacagctcctagtattatttttctcaaaattttctgtcatattttggtctatttgagtttctagtaattttatggaactctaaattttatactgtagagactttaaatattttctttcactagaaaaggctatttttttcctctgtcatgcagatagagtgagagtatgatcatttctctccaaacatggatatagttggatcagtactagactaaaatttgaggaatacttggtatactctgcttcattcctattccttaagcataggcttctgggcttttgattgagagaggttatctgatgtttgcaagctcatccctgaaagactacagaacatcattgctatcctttgatatttttctagttgatatgtctaatctcttaagccagtgcagaataaatattggcatatatctgtaggtgaaaccactgctttattccttgagcacaatggaggaaattttactccacctttagaaaggctctttctaggtctttagcctctgagcagtcccaagattcagaaaatattttctggtgatatctaggcatgtggatgatgctcctcaagttgtaacattttgattatttaaaaagcatcattgctttttgttttttccttcctccagcatagtttgtctgctgtggtaagcccaattctatggccaattctaggagtggaaaagtcacccagcttcataaggaaaacaaaaacaacattggtgagcatcagcttaactctaacagttctaacctcttgagtaagatataaaattctaaaatctattaatatctagtgaaatctctagcaattcagctatattagatagatacacattattattagcttcatatcagtttagctcaggattttacaccaaatgaggtggcactaattttgttgaaaatacgtgtttttagagttcacttattttgatatttgtgaataagtggctttggatctgctagtattccactaattttctgattaacaaaaaatagtaaagtactttaatctcactcaccccttgttaatgcatatagtatttttttgctgtatgttttaatttcaatttatttttaatatcaaaatcattattagtgtcatttaaaaatcattacatcatcctgtatatttttttctattatttattcttcaatctgaccttccatatgaaataattttattttttaaatgttatgtatttatttatttaattcatttctatttaatgagattttgctaagagaaaattattcctgttttcctttggtaaaaatgtctagctaatattcttaagatatatttgcactgggtacagaattctagctagacatttatgtaattttattacagaagaaaaaattccatttttctaattttatttttgttttgaaatattagtataatttatcattaaaggtaaattattgtttcctttttcacacttttatattcttctttatattctttctaaaacttaatataggctttaggttttctaaaattttaccttacatgttttactttgattaccctgatcaggatttataggtattcttatgtatttgaattgaaatttttaaacattcttcatcatttttttcttctaatgatgcctctgtctcattttcccactctttcgtaagtccaggtagacttgttatgatttcttacaatttgtcattccttataagatcaccttcatatttttcatttacttttctcttgaaaataatgtatattgtattcaattttatctctcatttctctaattacctcattaatttatctattttgttttgagtttttaatttgtattgtatcaagttaaaatacacatagagcaaacatacaaatctgaagtttataattaaatgagttgaaggaaatatgttcacctatgtatccacaatcgtaattaagatacagaaaatttctcttacctgaaaatacacttatgtccttgtcagtcatttcctacaccctataaacaaacacaattttgcatttttttgactataggctgtcttagtacattcagccttatataacaatgtatcataaactggatggattataaacaacataaatatatgtctcacaattcttgaggctggaaattctaagatcaaggcactgacaaactgggtgatgatgagggctcacttcctggttcacagacagccatcttttcactgcatcttcacatgtcagaaagggtgagagatctccctgagctctcttcttaaaagggcactgatcacgttcataaggactctgctgtcaggctaactatcccccaaagtcccctctagctaataaaatcaccttaaaggttaggaattcaaagtatgaattctggggtgatacaaacattcagaccatagtgattagtttgatttctaaattatatagtaagttgcttaattttaatttttttttttagtatacttaattaataaatacaggaagagttagagaaatgctctttgggccgggcgcggtggctcacgcctgtaatcccagcactttgggaggccgaggcgggtggatcatgaggtcaggagatcgagaccatcctggctaacaaggtgaaaccccgtctctactaaaaatacaaaaaattagccgggcgcggtggcgggcgcctgtagtcccagctactggggaggctgaggcaggagaatggcgtgaacccgggaagcggagcttgcagtgagccgagattgcgccactgcagtccgcagtccggcctgggcaacagagcgagacgccgtctcaaaaaaaaaaaaaaaagaaaagaaatgctctttggctaaattcattttgtcatttacctcaactattgtatttttattataacatatttctcacgtgtagtatctcaattggctttcctttacaaatccctttgtgctttacattatttatatatcttggaatgctttaagttatgatgactttctatttttttttaaattatactttaagttttaggatacgtgtgcgcaacgtgcaggtttgttacatatgtacacatgtgccatgttggtgtgctgcacccattaattcgtcatttaacattaggtatgtctcccaatgctatccctcccccctcctcccaccccacaacaggccctggtgtgtgatgttccccttcctgtgtccatgagttctcactgttcaattcccacctatgagtgagaacgtgcggtgtttggtattttgtccttgcggtagtttgctgagaatgatggtttctagcttcatccatgcccctacaaaggacatgaactcatcattttttatggctgcatagtattccgtggtgtatatgtgccacattttcttaatccagtctatcattgttggacatttgggtcggttccaagtctttactattgtgaatactgccgcaataaacctacgtgtgcatgtgtctttatagcaacatgatttgtaatcctttgggtatatacccagtaatgggatggctgggtcaaatggtatttctagttctagatccctgaggaattgccacactgacttccacaatggttgaactagtttacagtcccaccaacaatgtaaaagtgttcctatttctccacatcctctccagcacccgttgtctcctgactttttaatgatcaccattctaactggtgtgagatggtatctcactgtggttttgatttgcatttctctgatggccagtgatgatgagcattttttcatgtgtcttttggctacataaatgtcttctttggagaagtgtctgttcatatccttcgcccactttttgaggaggcatcacactacctgacttcaaactatactacaaggctacagtaaccaaaacagcatggtactggtaccaaaacagagatacagaccaatggaacagaacagagccctcagaaataatgctgcatatctacaactatctgatctttgacaaacctgacaaaaacaagaaatggggaaaggattccctatttaacaaatggtgctgggaaaactggctagccatatgtaaaaagctgaaactggatcccttccttacaccttgtacaaaaattaattcaagatggattaaagacttaaatgctagacctaaagccataaaaatcctagaagaaaacctaggcaataccattcaggacataggcatgggcaaggacttcatgtctaaaacaccaaaagcaatggcaacaaaagccaaaattgacaaatgggatctaattaaactaaagagcttctgcatagcaaaagaaactgccatcagagtgaacaggcaacctacagaatgggagaaaatttttgcaatctactcatctgacaaagggctaatatccacaatctacaatgaactcaaacaaatttacaagaaaaaaaaacaaatttacaagaaaagactttttatctttattgtctggtttgttaattttatctatatcttacaaatagcatacttacatgtctggtaatgttcctcaaataagtcatcttaccgtggagttattaactggtaatatgcagagcctttgagacccacccaaccacaagcctggtgccaattgtattaactagtaagagaacatcacaagcaatattttaactattttttcaggtccttgcccctattttgattttgcagacttagattatgaagaagaagccagcagtccatgttactttgccatattgtaagaaactatataaatcatatttatggagcaaattgtatgctacatactgtggtaaataataagtcagatatgattcctataaatctgttgtatttccaactcttgatgaaacagtaggtgactatgataactagtaaagaaaggagaagaaatttcatcttcaaaatttctgtagggtatataatcccttaagtaagtatgacaacaggttataaaaatttctaagtcttcaataacctcaactacagaaagggatcttttcaatctaaactatctaagaatatatgatatccatttcactacttcagtagtgaaattatttactacagaatgagtaattatggttacaaatttgaaataatatgtgttatcagggtttctatttctacatggagcttatttattttttagagacagggtttcactatttgctcaggctggcctcaaactcctgagctcaagttaccctcccatctcagcctctccagtacctgagattacagacatgcatcactgtgctagctgtgtgaacttttaaagtacctttagatcaactatattatattgagtaacactagtgaattatatgtggcaaaacacttcatttgaaatagttatctttactaatataaaaaaacttgctatactacaaacgtggaaaaaagtcaataaatggcaccataacattaggacagatacatatctctattttctgtgtttcaaaatacattttttaactatgttccttactagtttagagttactgaaaattcaaatctggcctccaaaaatcctaacggttacttatatgtttaagtttcatagcactgtccagtttatttcatggtttgcattgttccaaatttagatataatttctgtattatttttatatgaaattggaagtattcaagcagtaacacactttataaggaagtatccctgagagaatttcactgattgtgttttaataagatgagatatactaagatttcagttccatattattgtcttgttgtagaaactgtccttattcagtgatgcagaaaacatttagtttcctcttaaattcatagattcctattgagatacaaatgaattggatctggccttagagttttaatattcatattttaattttttatgaatgtgcttttcccctactaatctcttcttttcagcacacacttttattaatactaagtaacaacttttgtcttactagcatccatacttgctaacgacagatagattagcatagaaaatcactaataaaaaaacttaataaaagagttctcaaagtatatgacttagaaactcactaaaaagtgtttaaaaagtgagatgcccttagctggccagggcagttggggtcggggggtgcagaaatgtagaaaactctgtgttaaagttaagtagatttttctccacaagaaagacaaaatatcctaacttgctaacgggtattgaaaatatacagttgaaaacacagtatttcacattttctaaacaaatttgcaatacctcatattactaactccagttcctgttttgaagaatgctaatataatggcaaaaaaaatcagaaaagtgtgatttttcactaaaaatagggaaaatagtaaaggcacttaaatatactgacatattgtaatacaaatatcaaacactttctattaagtgatatggacagcatataggaggacataattctaacatcccttgtatcattagttaagaaaggaatcttggacaggacttaaaagagatgaaccctcggaaatataataaatgtaataattgtactagattaattttttcctagtcttctttttgtatgtgtgtttaagaactctatagaaatagtgttaaaataaagatccctcaagggctatcttttcacatcttagttaagaatatctgggtaagcttccagcaactgtacttttaagttattaggtatctggggattctcgtgcccaacaatgtttgaaaatcaattgtctaaaaaatcaagagtagaataactatagcctgcaggccaaatctagcctacagcctgttttaatatgtttaccaagcaaagaatgatttttacactgttttgatatgtaaaaaataaaagagaagagaaaaatatgtaatagacaccatatgtagcccacacagcctaaaatatctactttatggtcatttattttaaagggttggtgatctctggcttagacatgatttttagtaacagtttcactgaaatataattttcatactatacaatttactagtttaaatgtatatcctggtggtgtttagtatatcacccaaatgtgcaatcatcaatatcagattatagaatatgttcttaacgctaaaaaatacaaacccatacttacgaggagtcactcttgatctctccccttctcttgacccagaccctggaaaccactaatcaactttctgttcctatagaattacctagtatgaacattttatataaatagaatgatgcaatatgtaaacttacgtgactggcttctttcacttggcatgatgttttcaaggttctttcatggtgtagaatgtatttcattccttttttgctggatgattttctattgcatgagtatgatacctcttgtctctccagtaattacttcagggacatttgtttttgttcaagtttctggctattatgaatagtatagctataaacattcatgtattaatttgtgtttgggcatatgtttattttgggatatatattcaaatcccattgcctattcaagtcttttgcatattcttaaactacatttaaattttttttgcattgttcttaatatattacttgtatattctggattcaagtctcctatcaaatatatcatttgcaaatattttcttgcactgtatggtctgtttcttttcactttattgatgttctctgcaacataaaacttttaattttaattgatttttttgtcaattgtgtttgtttaattttcggtgacaaagttttactctcatattttcttctaagagtttcatagttttagctcttatatttaggtctatgattcatttggaattaatttttgtttacagtatgaagtaaggatctcgcgtcattcttttgcatgaggatatccagtttttctggtactatttgtagtctagagcattttttgctaccatctgatgcttttatgtgacatatatttatgttacacattaaaagctttgtatattaacatatcttcttatctgacgtaagttacagtctttaggtatgttagtgtatttcataataattggggcagaaatatcatattattaagctacaattataatgcaaaatgtaatgtttcccataacaaactagtttgaatgtttctctgctgtgtctagtctaaacaaaaacaaacatgtctaatatagaacacatcaaagctactgcatttatatatgccaacgttatacgggacagtaggaaagacaacatgtgtggcacctgctgtgcatgtattaagcacaaacttcaacttttctcagtttaaataatatgattttaaagcaaataaaaaggtggacatattatcctggaggaaaagaaacagtacttgatgtgagctattttattgttgccatgttcttatttttttcttttgactcctaccaagtattttgatatgtttctactgcagatcacttttacctgtttgaaatgtcctgttactgctgtggttcattagtgagtttatattctacaataacttatacttattgtcttgtcctagattaattcaatagagtttgagtttattatggaatacaaccacatcatagcaccaagctttgtggactggattgtagctgatacaaaaggaatgtaagagtattttatttgatgtttagtagcatgtcttatattatttttctacatgttgggggttttcatggtttgttccaaatttataaaaggatttctaaaaccccattgtctgaagttgttagtttctgaaagaaaatatgtaaagtatttcactgaatgttaatttgctacaatttttatactaaaatcactctcatttatgtgttaaaaattattacaacttagcaattccatttttatatgccatgacaacaaggattaaataaatctaatgcttctcaaaacaacctaatgaggtattaaatggacttattatagtgagcaaaaatgtaatatgtcaaaggtcgcagagtaaaaaggtaaatgtagttgtgaacgaaaactgtcaatttccaaagtctcagctgctgcaccagaaaatgatggtgaaagtaaaatccaactttatttaaacagagagaatgaatttgttttgcaggcaatccagcaagccagcgagggttttaaaagcctttttttctgttttagtttccaatctctaatagaatacacatttatactttaacttaattataagcttcaatgttattggagcatgatttctccatgatcactgtaagtatgtttaagtgatagaatataattaatgccagaatttgttatcacttgaggtacgcaccagataaaagctgtaagagaggaacagagccagaacctgagttcagaaacaatgtcttgggaattattacttaggttttcatacataccaaagcagctacaagaaacataaaagaactgaggaacagggcccctctatcgttgatgtctggtcaaatattattagtgtaatttgaaattctaaaattatacaatggatagaaggagaggaaaattaatgaaaggccatttaaaaacgaaaaattaaaataaatgatgaaactaaagataaattcacttctcatgctttgccttgtgtcagtcaaagcaattgcaaaacatttgaatagaatgaatatcactcctgaaaattttcaagtaccacaaaaagataatattctttctgaaacccattttaaagtcattactcttagcacaggttgctgtgctgtattttattcctgtttctattcatcagctatagaaatgctgaggtagatttatatagatagattcatatactttgagaccttaagatctcgcaattctctattgatacttaattaatttcttccatggttttgttgctcaaaatctgctatgcacattttatctgtactagggcagtgacatcatttctattacagatacttaaaaggaataacttaggaagggatttctgtatactcactgtcattatctcaattgctaaatctgtctctcatagggattttgaaatgtttcaaatgatttgctttagaaaattgaggcacttaaatgaaaaaaaagtacactattttaaaagtactctacaatctatgattaatgaggtaaaaactgacttcatctgacacaaaatcaaggcatgatatcgatcccaaacgtgagatcatctatgggtataatttgtgtcctttttgtgataatgacatgagatgtgcatgtgtgtgtgagagagagagaacaaaaagagaaaatcactttgaaaattttgttcgcataacattttagagctcaatatttcatttcttcctaaacattagtttggttctactcaaagtataaaatatcacatgctttgaaacacaaaatgtaaactaacttggaatcataggcaataatcactctgattgatcaaatccattttcagaatcagcaaatggcaagaataaatgtcatctttcccaagaaaaaaacttctactcttctgtatttatctttttctcagatcagctatacatgccaaatagatacttatctgtatcaagatgataaaaatagcagaattatcacttctgcttttcttcagtgattaactaaaggagctattgataatgccattcccattcaggcatcattaagaggtcgcctttctctatgctattcaatgtttgatctagtcaaataatttcaatattttctattaaagtttccttctgaataatggcattaaaattgaggaaattatttcatagagatttataaaatgagtctaagccttttaaattaaatttcaagaaaataaaacaattaaaatgtgctttatttgcacaagtctcagcacgttgaaaaataaaattcataataatatacaaatttggatgccttactttactttcacaaaataaaatcagtgtttccaatattttaaaattaatttagagagtagtaatttgtggacataaaactcctaatgtagaattaattagggtccctccacatgaccttcagaaaaatgtgtcccattcataaaggctgagacacaatgctatggcttgaatgtttcccctccaaaattcaggtgttgccattgtgactgtattaagaagtgagaccttgaagacgtgaggaagccatgaggggtcctccctcatgaatgggattaggcatccttaaaaagggacttgactgagggagttggtctttctctctcccacctactgccaggtgaggatacagtaagaaggcccacaccagatgcaggcaccttgatcttagatttccagatccctgtgcgaatggcatgttgggagtttaataaaaatccctatcacttcagtgttggtgtttatcgaaaagaaaatatttaaaatttggaacatgccagagtgtgagggacatttaaaaactgtaagctgtatttgcatttaagaacataaatattctgaaaccacaacaggtctctcaacaacaatgttttatgattaaaaccatgatttgagaacatatccagctattttaagagaaaataactggaaataaataatgcttggaaacagaagagaccaaccatactattgcataagattcttggagctaccatggtgttaaaaaaaaaatgtaatacacttgaaagataccttcagggacagtgatttttagccaggtactgtggattttgcttgtaatctcagctactccagaggtaggagcaggctcttgagcctgggagtttgagaccagcctgggaaacacattgagatccccatctaaagtagtgataatcataataatcataaaataataataatttttgtggtaataaagatagaaactgaaagagaaatggcagcaagtacttctttaatatgtgttttaatattacagcacatgataatatcaggtatgcataacgttcagcttaaaacaatagaaattaaacaattaaaatgtcccatttgtagttaaagagtgaactgtacttcaggtaataaagcacaaatgaggtaggtaatttaggagtaattctcaataaaaataaacatccaaacaaatataaataagactatttggaaattagaattcacagaatgcagtagaagaaaaagaaagaggcagtcattttggaaaaaagatagagaaatggttgtcatgaatgtggctgtcaaacatcaatgaaatcaaaacaaaattgttaccagcaatatcgaatgcttcagagtaaacctagaatgagaacaaataaaattggaaaacacactgttcaagtagaatgagccaaaaatttaggggtgaagccaggagaaagtggagtcatggaatttcttacatgagatattttcaagacgacaacactgatcagaaaaacttaagcttagttagattaaaggtggtttgggatcataaaaaagtaggtaatcagatcagcaatcaaaataattattttcagaatcaccaactgatcactaaccacatacataatactgttcttatgatatgacatctcttcccttgcttgggaatcttcatgtggattaaaaggagctagggctcatgtggaagagattggcttcaggttctgaaaacaaaaattctcaacacttgcagtcagtcactgaggatggacagtcatttttaaggggagaaatttccttatttggaattgtttactcttttctaagtaggtaaatttccctggctttgattttttttcaagtacattattactctgtaaactactcaaatgccattttcataagtccaacattttcaaatcaagaaaaaattatctactgaatttggttttggtaataagtaaatgagtgcattacttttaaaaatatgtgaataataatacatattcattttaaaaactcatgaaaatgaaagaaaaaaaatcagcacaattgatcattttctgaattgaaacacaccctttaggccaatctttctcgctctctcatgttgactcttcctcacatcctgacctcataacacccaactgctctaagggacagcccaccaacctctcccgtttctatgtattttcactctattgatgttttatcacatttagtgactttatgtattctgcctacattggtgattctcaagctttctctactgctctgacatctccattgtataccactaatatatctcattgtgtattcaatatccattttaataaataatagctaactcagcatgtccaaaagtcagctcctaatccttctcccaacaagttcttctcttaccatagtgctccctacctcagttaatcaaaagccagttttgccagggtcttagaccagacatattagagtcatcattgactccattctctcccaccgcatatgccatctctccataaatactagggatatttttacagaatctccccacctttcgcctcttcaactgcctccaggctgctgctagctcccgttatctctttcctatatcacacaattaccttacagctgatctctccttttttctttttctccttcaattattctgaccccagcatccacagtgagcccttaaagtggaaatcattctttttcttttaaccctctgccacaatcaaactcacagtcaaaaccaaaatgtttaaactgatttgcctcctctccattcctggaactcatacaccactactctttctatcactcatgttattttagtcacactggccttggaatagattcttgaatatgccagctgcattcctatatcaaggctttcaccagctgcaaattttctgggaaccctcctcaaaatattcatgtaggcttccccctaactcctgcaccattctttgctctaattgaactctgtacttgaccgctccccatactcattactctctatacctttttttttcctgctttcttttttctccatagtacttactcacatctatctgtgttttacttatttgctttctttcagtaggtggtatggttttctctcttccattagaatgtaaggtctatagggtgtactagtgttgtgtcactgctataacaaattaccacaaaattatcaacttaaaacaccacacatttattatgcccgtttttgcaggtcagaagtccaggggtagcatagatctgctgggtcttcttcttagggtctaataaggcggaaatcaaggtgccagcaaggttgccgttctttctggagactctagatatgaacctgctttcagacacattcaagctgtgggaagatttcagttgcatgcagttgtcagaccaagggttcttttcctttaatttcctgaatcacaaccactttcatcttcaatgccagcttggtggcttgagttcttcttatgttttaaatctttcagacctcttcttctgcctcacgtctaccacttccagctggaggatattctcttcttttgggttcatgtttgggcccaccctggtagtccagaattgtgtctctattttaagttctatataaccctcattatatctctgaagtccattttgccatgtaatataacatattctgaatctccagggattacaatttagacatggttccttttaggtgtgtgtgtggtgcggggggtacgttatcctgcctaccactaaggttatgaatttgtgagcatgtgcatatatattttttcacaatccttggctcagattcagcgcacattaatatgtgctttatacattttaaatagccaacttttaatgaatcctcagtttaacatggaaatagcaatgtaatatattctagtagtgtttaaaataatgttgccaattaaagagctatattgtttctaacatatgcccaaatatcttagattccttttagtcctattatttgtcttagaagcttcaagaaatataaccaaatttaatacttggcattgttactacaaaatgtataatctacttaatggcataaaggaaggtcagaaatcactatgaaataataagtaaaatgatatgtcatgaaaatatttatgcctattgaaaattatgaaagtatatagtgacaatggtagaaagaatcagaaaaatttttgaaaagaaatgggacttgaagaattcaaataatttcaattatatgttatgcctgtggaagaaaccataaataaaatatgacaaaggtatagatgtaagaaagcatagggcctatttaaatgagaacaaacagagtatgtagattttcctggaaataaatgttataaagggggacagaaagaaataagccaggacacaatggcattaataacttcaattcattaagcataatgaagaaccatggacacaaagtttcagtgggtgcacccagaaaataaacaaatacaaaaatatataacctatcagttggtggcaaacgttgtagaaaactaaagcctggaaggaaagattgagtatgtaaggaaggtatatttcagataacatattttaaggacatatctgaaaaaaatgtgaaagatggatctatgctgatctctgagggaataatcttctaagagaagaaagagaatacgcaatgatctgctgtaggatgggccaagagcaagtttaatttattttagaaacagaaagaaggcccctatatcagtatcagaaagagtatgtgtggggaagaagagtggtagcagatgtagttataaagggatttacagcctcactggagagggccttgactgaaagagtgaagaattctgactagattcaatggattgatgctgaaaacctccagagtttcatggaaataatttggagtttgtttgttttgtctttttaaaagacggccctggaaataatacatagtgtgaagccgagctggaggagattaagggtgaaagacttgttacagggctactgcaataatctggtggggaagcagaatatttgtacttgcagatgtggtgattgtgttgaagccaaacagggcatgagatgctgtaaaagaacaatggaggggagacagaggagaaaaaaaaggaatagaatttgatatagaattgccaaacttaagtaaatgaaagttaggaaggaaaaatcattcgggggggataaaatatatttcaattaaaaattattttatgtgtcactgtttggatgttgtatacaactgcacttataggatgtctcagattctccaggtcttgcctgtatctagagttttcttgacttgattcacccagcagcagctacaacaaccaactcactgtgcttctgatgttttggcacctgcaaagtcctaccaaccgaggctgttgaatcacatcttgagctcctcctcctcaagaaaactccattttgacataagaattttatttgtctcctactctctggttaagtgaattaagaagcaaatgaactaatcactaccctaatttcatgtcacaaatgatttaaagaatttatgtagaaagaataaaaatgaatgcatgaagagcaaaacaaggcacaaagcacagattggaataggagttacacacctgaagagacagagagggagataaagacaccatggctgagtcacatgtttgaatcttagcttactggcaacctaaataaaaaggttaacaaaagcagtaataaaataaataatgtccttgcttatagagtaagaacattgtattcctctgggggacactaagctttcctggaataacttctgatttgtttttcttttgtgcacattacatcagcgacaatctatgacataaaacacaatggcctcaaccatatttcctcaacaaatgtaattgtgggttttaaaacctgattttgacaggtcctttgaagaaagatgagactatgacactgaagtgaaactcagataaatttggggaatggatgacaaggaatgcaagaaaataatccacacttttttccagtagaaatttcaaataaaattacaaatagcaagcaagtttacagctttccaatgcttagcttattcttctctatctctagtggaatagatgtacaattatggaatcatatgtctttgctattggtggtttggacatgaagcttttggtctattttttttttcttttgggggattggtgaggacaccagggaactcacaaatctttgacaaccattatattccttaatatgcagggcaacacttctcagtcactactgcctccacactggtgaatttgtcctgacccaacattgacaggcctccttgttctaaaacactttaaaatctattcctagaaatattatctatagatataataactatgtatagaaaaaaatacatgtaaagatatatagatataagaactaatatctaagattacaaactcacttatcgatggctacaattattcttttttcctgctctgcaatttttttcttttggattcacttttgctgacatacaacactcggtagttcttccactgaaggctgtggatagtaacatttcattctgtttgtatgttaaggttgattttaagtaatatactttttatcattctcatgtttttaatgctttcttgttattaatataagttagtattatgaccacacatctagaactgaatgtaacatattttatttatttttaacttaattaatagtattattattttagagacaagctttcgctttgtcactcagccaggagtgcagtggcattatcacagtccactgcagcctcaaactcctaggctcaaatgattctctcacttcagcatcctgagtagctgggattacaggggtgtgccaccctgcctggctaatttttttgtagcgatgaggtctcactatgttgcccagtctggtctttaactcctggcttcaagcaatcctcctgcctcagcctcccaaagttgtgggattataggcttaagccaccgtgactgttctgaatttataatcttaatttgagaatgcgtgtcttttctgggacccctttttcagaccagttttaatttttatttactagcaaatcaaatcagaatggtctctgaaccatatatccagcaagttagtagttaagctcccaatctttcttatttcagaagaagttaaattttgattttccattcagatatattttcttttttgtctatcattacaatgtatttcgagatgggggtgaggttgaaggcattaactcaaaaaattcattttgaatgataaatgcattagtaatatggctaattttcttgtaaatgcacaaaagtgattttgagtaaaagagctcaatatttacttttggaaatgtttcatcatttttttcaatattaacaatgatattttaaatggttaaaaataaacatattttaaggtaaaaattatgaatgcaaatacgttggggaaacatatttcatcaggggaaaggatttgccatcatggagttccactcagtattaatgccaaggcagtcccttctccactgcttttgatcttctgtgtatcaggtagctaagcatttaatttggattaaattaagtgtaaagatttgagtgactaggttattaaaaatacatgtctagttacagcatttcagatgggtttcagtcaatttctggggcactgacagacattattctgttaaaaaatttagaatcaaattatagaaagccattgatggaagacacgcagccggcagcgaacatggcttgtaatgataggccattattatacttgagggcactggtcagacaaagtgtttataatgtttctaggtgtagttttcttgtctctggcttcaaattctaaagcagaccgacacctaaagagtccatcatttctttccctgaaaccagaaagtctagctcattttatattttatttacaattctacttttgtaacattaaactgaatgcttgtttctttcagttcatcccttttaattctcagcagtttctcttgcaagtcaaaacctaaatggcagtttttatttctcctttaggttccagatttaatgatccttctccaggtaatgtaagcatcactgactgatttgctctaactccagggttcatatatttcccatcatgccatgctcccttcttcttgtctagccctgtattgaatcaggaaaaggttacctacaagctacatggtttggaaaataagaaagtttaatatttcaagttactgtctctcttcacaattaatttgaatatatataaaaacgtactcataacatgcagtctctaaatgatatagaaatatatggacaatcgtgtttttatatactctcattcttccagcaagatgaaactttcattggttccttttagactgaaattctggaaatagcataagtatgcattttaggaacaatgaagcaaatttcaaaaatcaaaggaagagtgctcttacataatcatttaactcatcattctggtgagtaggactacaactaaaacacagatatgaaacatttttttctttaaaattagatcaaatgcatcagcatttttgcagattcagcacagatgttagcatttcccagacttagcttatgagacacatacagctattttacagtctggagggtttccaatattactacttacctaaatgacatttgaggtggtggcacttaatgaggtacacgtaatatagtacttaactcatgacatctaccaggcagaaaatactttattagctgatcctgttctatgaatataaattgatttttcctcatggttaggaaaattggctcttcagctacacttcaggatagagttaactgggtccatctagcaaattagagtaggtttccttgcataaatgacggcataaatgggaaagggtacttaagtccagtgatctttgtccctaggcatcgtgtttatcgattgccctacattcaggtcaggaagaaaggtcttaccttacagtttgtagagaccctggagtttaatcactatgctacaaagcattaggtaattctattttgttcaataaatgaattctttaaatgtcagggttttagcagactaggaccttgaaaaagtctattttctttcatgttccttgtttctgaatcacactgtctttgattcagaaatacaaatacgttttagttattgttacagtaactgatattgttgagtatatggcgaaggcctagggctatgtcattgaaaatgaagtaggtcaaggaagcatggggctgctcctattttttaaaattaaaaaaaaacttccaaaaaaggaagatagatagaagtagaggtaaagagacagacattgagagagacagaaaaaagagacaaaggaggagggtagagatgagaagggaaaagagagaaagaagtattgaatacaaatagtaaaaattttgtaattcaagcttaataataatgggtcttcagaaaaggggaattttcatctaggtatagtaaagaggaaatgctaatagaggaaatatgacttgagtccagttttaaggatatatagaattgacttaattggagagcaaagataaagtgcttccaatttggtaaagagaataagtaaacttgctgaggtagaaaaaaaaattaatttgtaagtaacagaaatgaaagctacttgaatgaatgatgtggaagccagtatgagacacagcactactaggaaatactttttaaaattattttaaattcgttagagacaggggtcactatgtttgcccaggctggacttgaactcctgggctcaagtgattcttctgcctcaatcttccaagtagctgggactctaggcatcctactgcagccagctcagatgtgctatttgtcaactatgttatatatttttactttcatatttacttttaatttcatatttgaagctttacaaagaaaatttaaacttttgtaatcagtatagtgaagaaaatctagatatcatatggaataaattgaagataaggcaatttttgtgaaagttaaaattatatttattccctttttctgtgaaataatttttagttacaatactgatagtttttctggaaatataagattaagaagaaatataaaacttggtattaacatgtgaaggactgtaatgaaaaaaattatgttgttatggatgatgccaaagggaaaaatcaaaacaactggataggaattacacgtaatttggtttccagtaaaaataataaataacataaagtgaaacattagaaatggcattataataaggacatagtatcccattactgaatatattcaatacaatatgcatgctccttagacaatgggtgctgtagatggtatcatacgttattttgtataacatctagggttgttactctaaaaatgtactatcatgtaaataaatacactaggccaggtaaattcaaattatagaagtcttgggaatagacctggtgtggtggctcatgcctgtaatcccagaactttgggaggccgaggcaggcagatcacttgaggccaggagtttgagaccagcctggccaaaaaggtgaaatttcatgtctactaaaaatacaaaaattagctgggaatggtggtgcatgcccgtagtcctagttacttgggaggctgagggaggaaaatcgcttgaatctgagaggcggagcttgcaatgagccaagatcgtgccactgcactccagcctgggcaacagagccagcttctgtttcaaaaaaaaaaaaaaagaagtcttgaaaataaatgttgaagatttctttcttgatgatatggccacaagaaaaagaaactatttcacaacaagatagatacaatgtgtttggagttattaagggactgttactctagaagtgatataagaaatttaaaaaaaatttattttgggaattcttattaaagtcttctgaaagatgcatagattatataactttggcatggggtatctttctttagagcttgggaggaagtcaaaagaggagtcattaaggaaaaaatttattatttgatattaataacatgattttgttcaatatttatttttaggtctaaaaatgtcatgaagccaaatatgtatcattttttctgattttaaaaacatatttttcaggatttttttaataacattctttctggttactttcagttgtttaaaaaatggaggagtagagaatgaattcatagaaatgtggacacagacacactgggtcatacttgagaggcatttcaatcagaaaacattagtctgcatgtagtagaaaatgcaagttcaagtggtttaaacaatgacaacattcattgtcacatataacaagaagctctagaatatttatattattcagtctactaattaggcattttgtcaacatcatgctatcatcagaagagcttttcatctttctagtgtcttatgcttagtgcattggtttgatcttcaggctattttccttaatgtttgcaacatgccacatcaagacataatttctgggataagaaaaagattatatgttcctgtgttttttaagtggtgggagacattttaagaagacataccacccccagcggacctccatcacatatcacatgtcagaaaatgataacaagtccatctcataagcatgtaccttcaagggaacaagaccaccatataactgacttaaaaaattaggatttcctatgaatcacatgcatgtgatgtatataccggaacaagttcaggctttgccagtaagaaagaaagaaaatggctgtcatcctgccagtatgaaagaaagagagaatggctataatatcaaaaatatacgatgacaattcatctctaactgatgagcaaattgcatatttttccattctatttctgcaaatagtttcttgctgagccaaaactcttgaaataaaatgtaagtattatgaaacagaaaaacgcttaaactacttactgctataatcaaagcaatttgccttgggaaatgaaaactaaaaacgaacacaatgtaatatgctcatgattttgcctttttaagaaatgtcagctacagggaaattccatgagtcagtaagtatctgcatagatgaaaatgtacacaaaccacacatgtgcacatatgtacacatatatacacacatacaaaggtttgtgaacatttaattaccaaacaattagccaactgtttggcttacctgtttatattcagcactggggccatcaggacaaaaaaagtgcttccagttaaatgcatgttaggtgtaccacagctagtgcttacctgtgcaatttatactttcttacttatagaatctggataaaaactggcaaaactggataaaagatttcttgttcattaaggattctgatatggtgaatctgtaaaggaaattataagtttacttggcccttatttcatgtgtgtttcagtgtggcctaagtgatggattttgagcactgtgcatgtatgtttgttgttcatttttcttttaggtttgtaatgctcattagcaaatgtaattatgtcacttccaatgacaaattacagcacaattttgtttaagttgaattcctcactttgattactgcaagttgacctattgctgcctttcccaccacatgcaaataccctttcattataatgttagaattaaaacaatttcacaattttattttgtactagtatatgaaaagcttaattaaattaattgttattttgtgtgtgtatgtgtatgtgtgttttcaagttcttgactgtgaatttatcacagatcaccaaagtgttttcacctttttaaaaattttcagtatgttactatgataatgatattcacaacggtaaccaaatggtatggaaagttttaaagtattaaaaagtaattatatataattaaattctatttactagagtagttaagtattaaacatttttcaatcaaattattttttaaaatgtgaataccaggtacccagtatagatccagttagtggagcatgaagcttatatactttggggatgacttatttaagaaataaagatataaaattgtaaaattaaacttttagtaaatataatacttatttaaaataagaaatgaataccacatcaaatgattacaatccagcagaaatgctagcatagaaatgccttctgactgcaacctacttcccttctcacgtagaatactgtgtagctcctacaggactgaccaagtaagaaacactgaaactaacttcatttgtttgtgtatcctcctctgaaagtaagccgaaaataatcggtatctttgatttaaaaacaaatactaccctctctccattaaggataaatcggaatttgctatatattcaagtggaaatgtatttcaacataaaatctaaggcaatatataaaaagtatctggcttcaaattaattaatttgttactgatacatttctctcaacctagcttttttgtttgcacttaatgaattctacagttctttcgatttttacattgctagaattaccatttaaaatataattaaacacatatttattctctaattcttgtctcagtgtattatcggctattccaattgaatattcaataaatattaaagaataatatattattcaatagtagcttcagattttattccacaagggctattatcataaaaataatacaaaggctgaaaataaataaataggctgaaaagggctgttatctctaaggccaaggactggaatactcatgtgaaataaaatttctccataaaggttaaatgagaaacttttttattttctcttatttttgaagaaattttagataatataggtacaatttaattttgaatgtaattagaatatgtaaaaattcttgaacccatgctataaatattcttaaagtctgctaagatagatatatattaaatgtggatatttatgacaaaatacttatgacaattcttgaaaggcaggactctgtaagaccttatttcacttttgtgcaattacattttgagaaatgtttatttttaataaactcaataaactgcagtgctatattattactgcaaccatgtcagatttagtgtgccaataatcaagaagcagtcaaacaaacctatgcaaacctttagtgtttagtttttaaagaattttaagcattctaatcatcgtagtggaacaactacaacttggttaagatttcttccacctacagtattttgtttaagttttgaaataaaaatgaagggccacaattatattttaaatatttagaggctgagaactcggctcctattcccacaccttattggattttactattctgtaaaatgtaatagaaatataaagacatggttcattatatactcaagactgtagttgtacacgtcacataaaaatacttaactattaataaccacatttgatttacgaaaataaaatttaaggttttttatttgattataaaggcaataattctggaaatatttgtaagaatatatcaaagaagaaaaactggtcagtttttaaattctcaccgtgtactaaatttgagattgcccatatacatctagactgtattttcatagtgatgtaatgaatagcagatattatatgagtacatattacaggcagaaaaagttaaggagatcccattcttctgtggagtacaaataatgttctcatgcaataattttgccccaaaatgaactactctggtgccatatttacatttaattaatgtgttttatgtctaacttctcaacttcttgctgaacaataaaataatgtaaataaaatgattttatatatgtgctataattatgaaaaaatagctattgcattttccatgtgtatgaaaatcttggaggttctagatataaagaacagaaacaaataatattttgttgtgtttttgtaagtttctgttttcatttgctagggctgccataaaaagtaccacaaagagagtggcttcgagaactgaaatgtaatgtcttacagctctggaggctagaagtctgaaatcaaggcattagcaaggttggttgtttctgagggctataaaggaaggtctgttccaggcccgttggcttgtatatggttgtgttcctggtctctgttcacatagtttttcctctatgatgcgtgtctatatctaaatcaccactatttataaggacactagtcatattggtttagggtccaaactaatgaccttattttcacttgattccctttataaatatcctgtctccaataggttacattctggagactaggactccaatatacctttttttgagaggacacaattcaacccattaatggttccccttgcctgaatacaatacaaaatagctaaatatttatactatgaaatatgtgtatgtgtagtgaaacatacaatttctcgtaacagttattttagatattttaacatatcggtgagtgcacataaatgcatatgtacacacatacacgcacacatacatgtcattaacttatacacctgaccatgtgttagttgaattaatcaaaggcatgtcaagaacacatagtttatgaaaagaataagctaaatcatccagtgaaatgagtgctatgcagaagttcaaagtatcacagaaatgaacactacattagaataagacaggcaaatagatttcagtggaaatcttccagttttaggaattatattatattaaaaaataatcccgaaaaatctaaaatctattagacttattgctgtaggtgattttttaaagttttaccacactgaacttggctcatatatacactagaattttagaaatataaaacagtattatatctgatctgttcaattcatctatattatatgccatatgattttaataacattatttcaaaggcatttcaggtaaagccagttttgaattaatttataattctttgactcacaaatcaaagaataaaatactcttctctatttcttcaaaggtagaaaaaaactgaatgtctgtagaagatgcggcaatctgaagttattttatttggaacattatgatataatataattttcatggaaaatatgagatgcatgacctaaataaaaatatggtttacaattgttcattggcatacacagacacatatttaagaattataccatctttggcctgctgcggtggctcatgcctgtaatcccagcaccttgggaggatgaggcgggcagatcacctgaggtcaggagttcgagaccagcctgaccaacatggagaaaccctgtctctactaaaaatacaaaattagccgggcatggtggtgcatgcctgtaatcccagctactcaggaaggctgaggtaggagaattgctggaacccgggaggcggaggttgcggtgagtgcagaccgcaccattgcactccagcctgggccacaagagtgaaactctgtctcaaaaaaaaaaaaaaaaaagaattataccatttttatttccctttaaggttcataatactcggattaaaatactagcactttaataatatacaacctaaaatattaatttccatttatcaaaataattgtcagcaatataaatattttaattgtaattagcttttatacgaactcaattattttttccatgaatcagcacaatatcttttgtttctttaaatttctaactgtagtgccgacctgtgaagtctaagagttgacttatagacatatccttccttactcttgaaccattatatccaggcctgggtataattaggcatgtgtcatttaaagataagaataaattctgagaatgcattgttgggagatttcattgttgaatgcaaacatcatagaatgtacgtatacaaacctagataccatagcctactacatacctagggtatatggtataacttattactcctaggtcactaacttgcacagcatgttactctactgaatactggaagcaatcctaacatgatggcgagtatgtgtgtatctgaacatatctaacatcaaaaaggtacattaaaaatatggtattataatttcatgggaccacggccagatatgtggtccatcattgactgaaatgccattatgcagcactgactaccagcagccttattgccagtagcagacagaacaacctggggccctataatcaggaacagtagtcccaggttatgttcctcagtcttcaatttagccacctctccattctttggatgtgatccctctcttttcacccaatcagtgattataaccatactgagagggatacatcccttgaaattaagtgcttgactgacttctggaaatgtagctatctagagattcctactatgacctcatctcctaaaagggccctatggatattaatgccagtcttactctgaaatcagttttcctttttattttttaatgtttcatttattgtaaaaaaatggaaacaaccatacttccacttgccagctttaccaaatctcaattttatgagaaattcatatcaaatttttaaagaaattaaatatgatagatatataactctaatgcaattgtatagaaccccactttctagaagggcatgtggattctcaatctcatgagaaattcatgtcaaattttcaaagaaattaaatatgatagatacataactctaatgcaattgtatagaaccccactttctagaagggcgtgttgattctcattgttgcatgtccttaattacgcttgatattgtttatggcttaacattttgtagctttgaagagattgaaatgattttttttctttcaaaattcctcgcactttttgaggctcagtattgcatatactttattttagcatttgtattaactcttctgtaaattgtccaattcatttgtgtatctttctattggcttattttattgctactgatttgaagtgtattattctgtatatattttctaattggaaactgacaataatttctcccagtctgtgatttactcatttatattggctttctttttctttttgtttttctaaatattttaatttcaatataatcaagacatttaataaaatatctggtatactgggtcccagttaagttgacatataaaattaaacattgcagatctttactgtgattaatgcaataccagtcccatattaggaatttatttcatgtccaaaggaaaaagtaaataaagataataactattagcagccatattgacaatagcaaatatgagccaactggggccctataagcaggaagagtagtcttaggttcttttcctttatggtttatacttttgtaatctgtccagagaaatttatttgaattttgtgatagtttattttttatcataattgtggcttagtagaacattttctatttcttactattttcgtgctgtgatcatttctctctattcatttaaaatgacatttcatatgaattggtattctaatgttgagctattcttacattcctgcgacatacccgtcttgatcataatttttcaaatagctacaaaaaaactatgctttaaagttatattcaacattgctaatttaatgcttgtaagattagtttccagtttacattttatatactgtgatgctcttaggtattaaggttatgcaatttaattaatagctttacttttttgttgtttattggttaattagtagctttatgtttttgttgtttattggcccatccactctttcaaatagtttatttaatttggggatcgtttgctctgagatagtttaaaattcttttataaaacttattttacaaaattgttggtcttggtatttacttttttattgtatttcaatgacttcaatggttatttatttagttttctatctcttcttcaccccaatttggcacattaaattttgctacaatttatatatgcacatatttgaatttataagcaaatagttatgtacagtgttctattatattatattcatctttaatattaaaaactctttatgtggtcaattttaaaagctctgtttattaattatatttatctgtttttattacactccacttttgaaatataaagaaactctacatcttaattaaaatggttcttattataatcaatgtttactttttcctttgaacatgtaataagttcccaaaatggcacaatcattgcattaatcactactagtagagtcctatgattgtcaatagtatctgttaacttgactgaggcacaggatgcccagataactgcttatacattatttccaggtgtgcttgtgagagtatttgctgactagcatttaaattggtaaactgaataaggcagataatcctccctagtgtgaatggccaacatataatctgttgagggccttaaacaaaaatgcagaggaatgttggatttgcattttctctctctcttctctcttctctctctctctctctcaactgaaatattaatcttacagcttacagacagcatatcatacaactttttttgcctccataactgtgaatccaatagcttataataaatctatgtatctatgtatctatgtatctatctatgtatctatctatctatctatctatttataagttctgtttctctggagaactcaaatacaaagccaatagtgttttatgaaataattatatggaaagataattggagtaagcttcaaagtaaaatactggagatgcttttttattccaaattataatgatctcaagtatctatgagaaagatttattagctagtgtaacttgaaggtacctgagtacgtctggcttcagtcagccttttccagaggctcatatgatgttgtcagagctccagctctgtatctgaaatctgattatttttcattttctttctgttgttattgacctgtctttaaatgccagcaaacattctctatttgctaatatgtacctgcttgcattccaagtatacaaatgatcactgatacaaataagtcactgatacacatactgggttcaaaataaactttttagaaagatccataaggatttgtttttggacagatgttaacagtgaaacaaggctgtatccaaagaattttggaacaaattaccataaagtatcgatggagtgttctctgattctcaaccatatccatgtagaacaattctcaaaataacagaaatggtttgtgggaagataaacattttggaaaaaccaagattaaaattgtcatgacatatagaaaatatataacaagttgaatgatgtcatctgcaaaagggactccacatccacctacatgtataaagaggctcttgagagaaatcttgaagaatcataggagttactctgagattacaatttatatattgtattttttgttggagaagggatcaacacctatgtctgtgtgctcattcctactgtgatgaagtttcaaagggaatagtttctgcaaatgtaaggactataggacagcatgacatattaacaaatatatatctattatagcatattaaaactgaaacactcaagtttttgcaagaactttaagagaaacatgtattttatgtcataaagtaaaatttgccaataccacaatagagagtaatgaaagtaaaattattcaacaacaagaaattattcctcttttttagatttagacaacaagatgtaatccttccttttaagcaaagtagtgtgttcttataagtacatataactaaaatattggccttacctctgttttctttttctttacctttattttctttagtcatataaaccttgaaaatatttgtttcaaatattcacaaactatagccaaggaatatcgaagtttgcttgcatataaacacttttagcacatgtttatgaattattaaatatcagaataaaatttgaaaacttttaaaagttacttgatcaaaaattattgaattcaagttgaaatgacacatattatgaatgatactaagtactggtgttattttactctattttccataatagtgaaagctacatagggataagcaaaaaagtatattccgttatatgtttaattatgtctaactaaggacatcagttgatatatactgaaaatttacaccagttgatctatcccattgatgtattatagtataaatcataaaattagacaaagatatctaaagagtacataatctctttaaaaatttcttatttcttaattacattttctccatatgtattcaaacatcacactgagttggctgataatttagctttacaattatgggttttaaaatgacatagagtttgcactgcaattccaagtggatgaagagaaaatgggaaataaatgaatgcttgcatttttaggccatcatggtaattctatttaaattgccatacaaagaacagaagttaaacttttcctaaaatttgggttggagatgttaagtattatttggaaaataaattacacaaaaccatctctttctctctttctctctctcacacacacacacgtacacacacagatgcacatacacacacacaaactccctgtccccagaatctatttgttataacagcacatataatataaagcaatgtagttcagaatagaatttcatttcattatattaagtgaaataaaaagagacacagaaagacacacaaaacaaatattgcatgttctcactcatccgtgggagctaaaagggttatctcacggaactagaaagtggaatgattgacacttaaggcttagaagtgtgtagtggtgagagtggagggtgaagagaggttggtcaatgtgttcaaacatacagttagatagaaggtataaatcctaatgtgtgatagcaataatagggcaaatatagctagcaacaatgtattacacatttcaaagtagctagaaaaaataacttgaaatattcccaacacatggaaatgagaaatactcgaggtgatgattactccaaataccccaacttaattattacacattctatgcatgtaacaaaatgccacaggtacccaacaaatatgtcatatattatgtatcaatttaaaaaagaataaaaaagaaatgtagttcacattgtactgtaattttttgttacttcaatttgcaatgttgttttctgaatagtttatgtctttctcacgtatttcaattcttttctattgaaatagcgaagacagttataagttgataactttatatcttatctcagagtgtgtatgatgagttcagcattcattcatgaaaatgagcattcctagttctctcaaacatcaaaaaacagtagaaaactaaattctttttgcatctaatttcttactagttcttctatttacctgtttttttagtctaatttctatttactacaggtgtcaagaagtcacagtttttagaattttatgattaaagtgaaatgtgctatggaattatttaaactacagcctgaaaatgttttgctttcttgtgcttctacttgtaattgatgtaaatatttcagaatagctgtttctgttcctctgcagaggttactttctataggtagaagaggcagtggaataaggatacttatagagacttcattatgctttatttctacgtccagccaagcaaatcctcattcaaacttctttgaagcctgtattctcttccttaatattggagaaagacacagtataataaactttctgaaaacccaagttatgaggctccattaaggcaatgaatgataaaattaaaaatctctggctaatgcaagatggtacacgttctcatatactaaatgcccatctaattaaaaaataactgattgctaaactatgagttattgagaatgagttcaaatatgagagatcacaaaggatttccaaagtaaataaaattcaaaaaaaggcattgttaaaggagtaaaattttgcagatgaagatcagccaagatggattaaccaggttgagaaacacatcggcaaactccaaaaggtagatgggaatatgataaacagaggacagcaagacctcttcctggaaaaactggactgtccaattttgtaggaatattagaaatcaagggctgttatgagaagtgtagctactttatgaatgatgatgagtggcctttgcacaaaatcagttactatttacagttttctctttttaaaaaaacatgagttattcctatgggataaataatcttccgttaccttcatatacccagcaaaagcacagtgtctgaagaaaagaagtagccagtaaaaaagcataatgtgagtaaatgaagaaatgaatacaggaataaataaagaggtgaataaatgcacgaaataaagtattttagaatacttattctggcagcagtaaaacattttaaataattttgaaaagtgcctaaagatttgaaaagaatatgtaaatttaaatcgtccttgaatattacacatatataaatcagtatcacaagttcataaaatccataagagatgcatcgctatcatttctcaaattttaaggtttatagcaggtatatcagagttctaagtttatgttagcatttggctttctattggcatcagcattctaatttttttaaagtaccattctgaatagatgtttaaaatattgacgataattatcaatatcatttctgatattttaaaacaccatgttgtataaaatcataatgagatggaatgttatactggactatgaatacaatagcactgggaatgatgtcattactaaagactgctttttactttttatcatccctaagggaagaaataaaaactgcatttagattgctttatttaaatcatattagaatataattataattttaaaacattggatatgttttttaaaaattacagaaaagtagaagaaaataatcagttcctttgttgaacacagtatctatgtgaaattaaacaaacatataaagttgtgtattctttcttcaacaagcaaagaaagtgggagaagcttcaaatgatgaagacacagaaaacaattgatgctggaattttctatcattgtgtatgttgtttttgtggctttttataccaaatcattataaaatgagtcaagcattatatactctactgattcttcatgagtaagaatatacaaataaaattgatagtaaaataactaaattataacaacttatactttatacatatatttaaaagccatgattatggaaatggtgatacatatgaacaaattagtcacctcctgaaatttgtgtgcattcaatgtttattataatttttttctatcttgaacaaataaaaattaatccaaatattttcaaaaagtgattacaggatttgactggtgttcatgtgaaatttcagaacacctgtatatcatatgtaggccttatcaaattgaagatatctgtatagacttgtggatacacacacacacacacacacacacacacacacacatatggttttaaatttgtgttttcctacatatacatatacatatacatatacatatagtccttactgtaccaggagagggtctgagagcagcaaaagtctaatagcactgagttcaccttctcttgcctcctcttagcttccatatatcattttcaactaaataagagactcctcagagaaatggctgattctaagcaaaagttcatagtgatactggaaacaccatttctatcagaaagccaaatgtgttaaaaaaattatggggcatgttgaaaggacacagatgtcaacttgaaaaaagctaccattagccaaatttaggataatttgagcttcaagataaatacatttggctccctgtatccaggatttctacatccgtgggttcaaccaaatgtagatcaaaaatatagaaaaaaattgtgtctggccgggggcggtggctcactcctgtaatcccagcacttcgggaggctgaggtgggcggatcacccgaggtcaggagttcgagaccagcctgaccaacatggagaaaccccatctctactaaaaatacaaaagaaacttcagctgggtgtggtggctggcgcctgtaatcccagctactcgggaggctgaggcaggagaatcgcttgaacccaggagacagaggttgtggcgagccaagatcatgccattacactccagcacgggcaacaagagtgaaattccgtctcaaaaaaagaaaagaaaagagaagaaaaaaaactgtgtctgtactgaacttgtaaatagatttttcttgccattatttcctaagccatacagtacaaaaactatttaccttttactttgtattagcagttataagtaatctagaaatgatttaaagtatatgaaaggatgtgcatatgttatatgcaaatacaatgccattttatatcagggacttaagcattcatagactttagtatctgagagaggtcctagatctgatcccctagggatactgaagaatgatgatagtcccataagattataatggagcatatggagaaacctgatacatggaacttgctattagcattgcagatcaagttagggacaataattgatattaagtaatggtgcttggacatttagtttttcatctgaaaatatacatacataaactcaaatacatatacattttatatataaaaatatatattatctagttttctgtaagtatactctatgacgtttgcacaataacgaaatcgcctcataatgcacttctcagaatacaatcatgtcgataagcaatgaatggctgcattttattttaacataaatgcatggacataatacaaaagaagtgttacataggctttatgtcacctttatccccagtgacactgcccagaggcaacaagttttaacttccctattttcttggttcatctgcagatcactcgcattgttttacatatagatacacatatatatatatacataaatttattttatatataatggtattatattatatatatgtgtgtgtgtataggcatatgtacatatattccacttattggtactttaactttggacagtttcaattaacttgaaaaaagagaattaactattatgaaaaatgaacagtaaatgaactataaataaaccctatttctctttctcagtattatccctaagatttttctcgattccactatttattgctttaatcttttgtataatatatttatacccatttctcgtagttaattaactgcacagcagtacatgttggctaagtaagatgagcacattttaattcgtaaccttttctccatctctggtatgtttctctaactttcaaatccttctagttgttttgttttggttttgcttttaccttgacaagctgtataacttttatgtattaaacaaatcttgtccccatgctgtatttatattttacgttgagacaagaaaacagaaataacgtaaaattagtattcattacagaaatgactagtgtacttggatctgtagaaaataaacatattataatataatcatttttattcaaatatgttctcatatataaattaggatcatttctaaatttgaagaacagatcttcctgtcacattgttgcattccatatatttcaaaatcagtccatatctttgtttgcgttacatttgcaccatgattttttaacatattttttcctgaaatttctattttttctttcctgttgacagaagaatcacatgcccttactatattgctaacatccagtttcttaacatcacattagcgatgcacagcaactaataatctattcttaaggaaagagggctaatatgctaactccatggttttggcaacttgagccccttttgtattacttctcttctatagtcttagttaggcttgcatcttgcagtctaatatagttagttgtaccagctactataatatccacattctagttgttggagatgggtgtgggagaagagggtaggagccttacctttcaagtatgccacaaggaagttgcatatataatatagcttcaataatttcagtgttaacttatttgtttaaacaacagacattatttatatgaacacaacttgttgcaaaaaagccaataaatatagttatttgcttattatgtgctagaagtaaaatattattatgagagaaacaaagaagaaactaagaggagtaatagcaatgtctgagaaacattctattaatcacatacagcaataacaatgcaccgattcttttcttcaacatggttttctccaatctgggactccttgttcttacttagagccatgtttctcaaggctttcctttccttatattcctgaatcataaatctctttcttgaatttgatttttattttatagaacacattcttttctctctcattttttggcctcaaaatgaattggttatatttgaaaatatcttccttttgctctcatgttttgaataattgctgagaatgcatggattttggttaaatatcatgttttcacaaacatttttccaaaaaatggtgttgctgatgaaaaatatggtagaatttctgagttttgtcccttgtagacgaaatgttactctaaaaattttttaactttgtgttctaaattttctgaaaaagatgtatcaaaaatgccatccatttttttatgaatcatgctgtttaaaattcagtaagatctttcaatctgaagttttgggatttttccttcactctgcaaactttttattgtttttttgattatttcttccatgtccctctttctctctttttctgtaatatttatttagacaaattgcaaacttcatagatatttgaaatggtttgtctctgtgtctctacccaaatctcatggtgtattgtaatccccacatgttggaggaggggcccgataggaggtaattgaatcatactggcagacttcccccttgctgttcttgtaatagtgaatgagttctcacaggtcaggttgtttaaaagtgtgtagcacttctcccttctctgtctctcactggccatgtgaagatgtgcttgcttcacttttgccttccaccgtaattattagtttcctaagcactccccaccaggcactccaccacccagccatgcttcctgtacagcctgtggaactcttaagtcagttaagcctattttctttataaattacctaatttcaagtatgtctttataacagtgtgagaatggactaatacagaaaattagcaccagagaagtgggccattgctataaagatacctgaaaatgtgtaagcagctttggaactgggtaatgggcagaggttggaacagtttggagggctcagaagaagacaggaagatgaggaaaggtttggaacatcttagagacttgttgaatagctttgccccaaatgctgatagtgatatggacagagatgatcaggctaatgaggtctcatatggagatgaggaccttattgagaactggagtaaaggtcactcttgatatgcttgatatgctttaacaaatatattggtgacactgtgcccctgctctaaggtctgttgaactttgacttgagagagataatttagggtatctggcagaagagatttctttctttctttctttctttttttttgagacagagtctcgctctgtcacccaggctggagtgcagtggcatgatctcggctcactgcaacctccgcctcctggtttcacgccattctcctgcctcagcctccaaagtagctgagactacaggaacccaccaccacacccggattatttttttgtatttttagtagagatggggtttcaccgtgttagccagcatggtcttgatcccctgacctcgtgatccgcctgcctgggcctcccaaagtgctgggattacaggcgtgagccaccgcgcccagcccccagaagaaatttctaagctgcaaagctttcaagtgtgacctggctgctcctaatagcatttgctcatactcatgagcaaagagataatctgaaactggaacttacatttaaaaaggaagcagagcataaaagtttggaaaatttgcatcccagccatgtagtagaaaaggaaaacccattttcaggaaaaaaattcaacccaactgcaaacatttgcatgagtaaagaggagacaaatgtgaatagccaagacaatggggaaaattcatccagggcatttcagagatattcactgaagcctctcacatcacagggctgaaagtgaagaagaaaaacaaaaatgattttgtgggccaggcccacgacgctgctactctgtgcagccatgggacatggtgccctgtgtccaagccactctagctccatccatagctaaaaggggccaaagtacagctcaggccattgactcacagttgcaagtcccaagccttggtggcttctaagtggttttaagcctgtgggtgtgcagaaggtgagaattgaggcttgggagcctccatctagatatcaaaaagtgtaaggaaaggcctggatgtccaagcagaagtctgctgcaggggcagaggtctcatggagaatctctaccagggcagtgtggaggggaaatgtagggttggagtccccacacagagtccccattggagcactacttattggagctgtgagaagagggccaccatcctccagaccttggaatggtagatccaacaacaacttccaccatgcacctagaaaagctgcaggtactcaatgccaacccatgaaagcaggcttgggggctgtaccttgcagagccacagaggtggagatgccaaaggccttgggagcctgcccgttccctcagtgtggcctgaatgtgagacatagcagcaaagcagactattttggagctgtaagatttaatgactattctgctggatttcagacttgcatggggcctgtagcccctttgttttggccaatttctcccttttgaaatgggagcatttgcccaatgccagtactcccattgtaccttgaaagtaactaactcatttttgattttgcaggctcataggcagaagggacttgctttatctcacataaaactttggatttggacttttgagttaatgctggaatgagttatgactttaggtgactgttgggaaggtatgattgtgttttgaaacgtgagaaggacatgagatttgggagggcctggggcagaatgatatgatttggctctgtgttcccactcaaatctcatgttgaattgtaatccccacatgttgtgggaggggcctagtgggaggtgattgaatcatgtgggcagactttgctcttgctgttctcataatagtgaatgaaatctcatgggatctggttgtttaaaactgtgtagtgtctcccccttctctctcgccttccatgtgaaaatgtgcttgcttccccttcatcttctgccatgattttaagtttcctaaggcctccctagccatgtttcttatatagcctgcagaaatccgagtcaattaaacctattttctttataaattaccagtcccaagtatgtatttatagcagtgtgaaaatggactaatacagtattccactgtgaaacttttttttcaaatgctgtaaattccccccaactctttgtttctagagttttacatcaagctttttaacttgatatctcatggtaataatactatcttaacttccaaaaataccctcatattctctgattacttttttctcagagtaacctattatttgatagatattaccttttcgtgaatttttctaaaatactaattagaattacctaacttgtattatgtccctggattattttaggctcttctaatgttagttatctttttggttgttaaatttcctcataggcatacatttcttatttgtgtttttatattttaaaatacgaaaacaatggcttggttgccatagaggcttgattggaattgctattccttgtgaaactctgtttcggcatttggcctcttccttaaatgtaaggctcgaacttgacttctgtgaaatatactaacctattggttttacttcatgatatttgggctgggagcacagatttatgctttctccactgtccgtcctgtcttctcaaaataaacgtggcttaattctaaactgtcaatacctacactaggagttcaatcttacttggggtctttagactggatacacctgctttaacctgtacactcatgtcattagtgccactttttctattaaaattcagaaatttaactagtccattcccacttactggacctgctgacttcaatcatttccagggctcaacagggaggaaacaattctacctccactgacttgccaaattccgggttcctgatggggctaactaatgctgtaatgtatcactcactcaatatgagcccagttgccttagacctttaaaaaataagctttgctcattgttgtcccattcttcatacaagtctaagaactacttttgattatttttgtatgccttagattttaagaagggaggtaaataaatatatgcttttagtattccatgttgaacagtagtgtaggaggtattttaaacttttgtagatcttaaataatggcatagaaagaaaaagagcatttttcaatattaaaatgagaatacaatcaataacactggaagcagatgcttcaaattgtccttgaaacatagtggcatacaattcttttgggaagaaaattatttatccaataggatttttttcaaaaatatttatattgtttaactatccaaaataaaaatttcattaaagctttggaggtaaatacaattaaaatccgagtcatttatttgatttaagtgattacagtcatcctttgatatccataggggattggtttcaggatccctatgggtacctaatccagggatgctcaagttcctaatataaaatggtgtagtatttgcatgtaacttacacatatcctcccatatactttaaatcatctttagattgcttgtaaaacctaataaaatgtaaaggctatgtataaggttgttatattgtagttttaaaatttatatcatttcttactgtgatattattaatttttttgagtatttttgatccacagttggttgaatccatggatgtgggacccactgactgggagagccaaatgtaaacattttactagaagtaaatatgagtattctaaatttttaaaagcttaaagctctcaaaataatcacatctgtcaaatgagtaacagcacacattgctatgcaaagcctcaagtcaatcacatatacgtagcaggtgatggcttactttagtatgaaatgaacaaagtttgaagagctatggaattgcaaaaacatgaagttagattgaggtcttatcttaaatagctgtgtgaactttaacttgtcacttaaactctaaatttctgtttcttcatctgaaaagtggaatacataaggttttcttgaagaatttttaagaggatgacaataaattttacatgtacttcattacttacagatgatagatactaagtaatgttaaaaacacacttgcaatgccaaaagaagttacgttatttttataatttatgttatatataatatatctaaaatttatctaataaaatagaggacatttacataaaagtatttataaactgacacaaatataaaaatcgcagaaaatcatttaaaaaattaagaaagaattggttctctctgataacacatgcagtaagtttaaaggaaagaccaacaagaaaatctcatctgagatcttaaatggggtatttattatttaaatgacttttctaatttcttatggttgatattcagccttacagtatcaaatacatgattttgtcaacactgagaattaattattttcatagaggaaaactcataaaatcaaagcttataacaaattgtaagaaatctaatactaagcttgaatgccaatatattaatttacagtaataataattgctagacatattaaaagcctattgaaatttataagggacagtctttcaaggtaatttaaaaaatgaagaaaatcattattagacaattacatcacttccaaagagaaatcagtctcaatgactagctggtatacccaaagatttcaacatctccatcagtctccacattaggtataattttgtatatggatcttgaagattcaaatattcatattactaaggttttgtcctacatatgaaaatacttggatcaacatcacatatttgtctatgtaaattctatgtaaaattctacttaattttttaaagaatgggataaaactccattttgatggaaattttgtttttcaagtcatattagtaacaaataagaatattactgaacacgtgtcatgatgagcactataaactgaatatcactttaagagatatttacatatctctattctgatatattaagggtatgaaaaaagataatttattaatttactcagtagttatttactgagtacctgtcatgcaccataccagatgttccaattatagtggtagacaagatggatagaatccctgattccattatgcttacaaactgatgactatatgtcaattcagaatagcatttctcagtagtgtggaaatctggtaaatagggacagtaaagagaaaacaaatgagcataacactaagaattctcatgttgaactgtcactactgcatagtgtgtggatcctcattcacactatttttttttttttttttttttttttgagatgagttctcgctctgtcgcccaggctggagtgcagtggtgagatctcggctcacttcaagctctgcctcccgggttcatgccattctcctgcctcagcctccaaagtagctgggactacgggtgcccaccaccacgcccggctaatttttgtatttttagtagagacggggtttcaccgtgttacccaggatggtctcgatctcctgacctcgtgatccgcccacctcagcctcctaaagtgctgggattacaggcgtgagccaccgcgcccggcccacactattctgactaaagctacacttttactgaaaggtgcagatgtctgggaaacgtgcatctctccaacacttatgactatttgacatgtctcaagtattttataaagtggtttatacgtgcttgtcttttcctttttacaacatatcacattctgcatttcaaatatgcacataatgaagcaggatcagaaagagaaagtaacttgcctaatgtcacatagctctttaactgtgaagccaaaagtttatctcagtgttaagggctgaattgtgtaccccaaagctcatatgttgaaatgctaagctctggtacctcggaatgcagttgtattaggagatagtgtttttaaagaggtaattaagtcaaaaggagatcatgaggatgggccctaatccaacgtgactgtggtccttataagaaaaggaaagtaggacacatagagaaacagaggttagagcatgtaaagacaaagggaaaatacagccatttgcaagctaacaagagagacctcaaaataaattaatcccactgatatcttggtcctgcacttctagcctccagaattgtgaggaaataaatttatgttatttaagttctccaatctctggaattttgttatggcagccccagcaaactgacatactcagattggactgactccaaataaatggcttataagcaaaatttatggaatttataaggactttataaagaaaaagagatattctatggattattaattatttctccacacataaaagatattctatatgtcaaaaataaaacatcattgggttccaattcttatatctaaggtataacttttaagaaaaaaaatgagtaaaatgataccagaaataaagacattattaacaggattatctgatgataagataacaggtatttctttttatatttaacatatttattctatatgatctagtatgttttgtcaattaacatttctttttaaaatacttattaaatactattttaggtatttctattaataattattgaaatctattacaagaaatgaatttgctggatgctgtgaggacaaaacaggggaagaacacacagatttctaaagtataatccttgtaaatgcatccactatgacttgcttctctaaatcatggtttaaaacagttggttgtttctttgttattgattctttttttttatttttatttttttactactgatggtaaatcatccacttctatcacagtcaatctttcctattaggaaaattccagaacattcctcttgaagtatatttcttttttttcttttttgagacggagttttgctcttgtctcctaggctggagtgcaatggcacaatctcctctcactgcaacctctgcctcctgggttcaagtgattctcctgtctcagcctcctgagtagctgggattacaggtgtgacccaatgtgcccggccccaatttcttaagataaggggtggggatattattcaagtcctactgcaacgcccaggtaaacaggggaatctaatcatttccctgttgctattgcctgttgttctggagagttcaaggactggttgttactgctacagtgatattcttgccatgcaaacttctgaggctgagttacctcttggtttcccatgtttgaaccccaataataacatgcttatagttgacatgcccagttattttggctcttccttagggtcaggaaaagctccacagggcaatcataagtcatatccaaaacagccgctgtccctgagatttgggtgcttattttgagccagagtaaagccgaaactcttccatctcttctggtgaatactccttttggggcatttgaccctatgttcactgacactctgcctttctagagaggtgttctgaaaacccagagatatgttccagtgatatgtctttgcaatgccagaatacgtttagcataacctcccaccttttcccaaaagcattgacatgcctcctcttcaaacatacacataaacaaaggaggaccattccagtctttctttacgaatcacacaataagcactaaattgctgcttgatttctacatcagagagactagattttgtaagtaatacttttgaatgaaaaactcaatctcattttagatcttttattcaaagaagataaataacgggcctaaagttaacgattggggttgaatatacatttaagacagcatcccacgctccagcatgtttctcccacctcccaatctccctttttttattttgtgtataatctcatgtgctgttttcatttcattgtaattttcttcataattaagaatctatgacttatttcctttccctatcatttcctttctcgtaacatagcaaaacaatgtggcaaaatcagtgatttgttacttaagtaatgtaatcagtgctcatttaaaaaaacaaaaaaagaatattttaatcatattttttctttatgagtctctacttgtttgcacatatttgtagtagggaaaaaagttgatatagtaaacattattttccttccttttctttttctttattctagcagttgctcattgaatcaactggtataccgaaattctgtcttttgagcaaaggcataggtcccagacagtggagtgggaagaaatatgtagagacagtgtctgggggaaaagggaagaaaagaagaatatttgtgcactctaacagcagagacaactcatatgctatttctttgcatctgaatgaagtcaacaaaactcatggaaaacagacactgttctctgagttctacaaaaaaacagagcctgaggcaaagaacccgtatgttaacaattatttggcaaggggcattgccagagaagtaagaatgaagaggaaaacaaacaagagtgcagtaaggaaggaggaagataaaatacaaagtgatgtgttgctaagcttgtgacggcttagcgtcaaaacacaactgtcacacttggaggcatctcccaagaggctgcttggaattactgcatttcagaacagttcacagtaagtgaaagggaggggaggaagattgagcaattaatctgctgtctctttcctgtcttctgtctctgtatatgtatggggtatagataactctcttgaccccccacagtcactaagttctgggttgtgttttctagccctttaaagtagccattggtgaaattaaagacatcacaggcctattcatgcctgtgacctctccttagcaggaagtgcacagagagaaggggaatgttcttacgcagcggcgaaggcagcagccaccacactctgagctttagaactgtgggtacacagtgagccattgatagaactgacccagcaaggaagaaagacaaataatggaagaacagaactatggcaattttggaaggtacctgataacagttcggatattttttcccactcaaagctcatgttgaattgtaattcccagtgctagaggtgggggtctggtggaaggtgtttgggtcacgggggcagatcactcatggcttggtgctgtctttacaatagtgatttctctcaatatctgatcatttaaaagtgtggaacaccttccccacaattctcttccttgctcttgccctgaccatgtaacgtgccttttgttcccacttcactttccaccatgattgaaagctccctgaggcttcaccaaaagctgcagatgccaacaccatgcttcctctgaagcctgcagaactgtgagccaattaaacctcttttctttattagttactcagtctcaggtatttctttacagcaatgcaagaatggcctaatacagtatccagtaaaaggtaaacttttctattcacctgacagtataagtctgagtgagaaattattaccttttttacactttaaaaatttcctacctactatagaaaaaggtcttatctagcaatgtgcaaaacaattataatcaagggctgtttataaaggtgataatacacatccatacatgtttatgctcataagtttgttacatcattgatattgagacgtgaaatggactctcaggagtcacagctcagaaacgtcagagaacaccgataagacagaatttcaaagtattatagtcaaaactaaacttaactaaaactgtaagtcagtgaaaactaaacaaaacaaccaacctgaaggaatagcaggggaaataaagagatcaatgaaaggtttctttgatgagatttatttctctgacttcacggaatactgaggaaagaaactttgtgtacaattatctttaaggaccttgtatgaaattctaaatttcttttaattgcaaacaaacaagcaatagcaataaaaataatctctttttatagttataaaatgaatagcctgattgataaaagacactcttgtctctctacccttttcaatatctaaaattagaggaagagtggcagagatgacgttatgggtttgtctctcaaatgagaaaataatcagaggccacatcaacctaggactctcagagacttttcatggtatggcagttttcagccacacattaacccaactcctctgcgatttctatcctcccagtcggtctctgctctgtgtgagacccccaggtatgtggcatgacccttgaagggtccacaaaaagaaatgaggtctagattaatgtcctttgtggaacacaaggtgtagaggtaaaatttaagtggaaagagaaagtaaaattatattttgtgtacaattgagtttgttgactaatattctccctctcactttaaatatatacaaactcagaatattgataactcatcacaaatatataaacggaattatatctttaaagtttgcttcatttagtaaacattatcaaaatcactaatgatgtaaaaagtacatttaagtaatatattaaagtgtatagatgtgccatgttgtactcatttgtacttttgttagtagatatcttggtatatataaactgtgatcaaagctatgattactccctgaagaagcattttcagaagaaccaattacttagaaaatttttaaagactcttggggtattgcaaaattgccctccagaaaattcattccaatttacaatcactctatcaatttattagagggttttttgcaatcattcactgtttattgcaacctctcactggcagtatcaaatgtgtagtaagaaaaacaagaaatagtattgttattaattcctattaattcagtgaacatgtcttaacatacatgttggttatctgcatttctttgttttaaaattcctgcttataaatgtactttatggcataaagtagggaattgatttggcctaccaatatcacagtaaattgtgttcatttagaacattagctttgtggtcagtctatgcttcctaatgtaatgttgattagcttggtgacatgggttacattatatatcatttttaaccttcagttttcacatctataaaaatagaaataataataaatgtatatctcctagtattgtttaatctaaatgatgtaatacccccaaagtaattagcacgtcactagtacactgttcatgtcgaataaaggtaaactgctataattacaggaaagatagttgacatatctgctaaagcaaaacttgaattcaacacaagtgtctcattctttctttaaaaaagccaaaaatactaaatcaatatttaaaaaaatagtattgatgtgccaaactaaaatatgaacaattttattttaaaataatcttacaaaatataattaaattaataaactaattctttgtcataagaaataagtggttttcatgatgcagacctattagattaaggaagaaacttcaataagcacattatgttatatcattgattttttgttattattttctcatgcttgtggcctgttaactgagaaagtgaataggccattaaaatgttctaggtttttaaaatatatttaataaacatagaaggagaagttgcacttattaggctgtacttcatgtaattcacacagccacaaaacaaatggtgagtataaaacatgttctactgattgcgggcaagacagccaaataagaacagctccagtctccagctcccagcgagaccaatgcagaaggcaggtgatttccacatttccaactaaggtacccagttcatctcattaggactggttagacagtgggtacagcccacggaaggcaagcagaagcagggtggggcatcacctcacccaggaggtacaaggggtcggggaactccctcgcctagccaagggaagctgtgagggactgtgccatgagggatgatgctatctggcccagatactacatttttcccacggtcttcacaaccacagaacaggagattccctcgggtgcctacaacaccaaggccctggatttcaagcacaaaactgggcggccatttgggcagacacctaactcggtgtctgcaaactgcaggagtttttgtcatacctcagtggtgcctggaacaccagtgagacagaaccattcactcctctggaaagggggctgaagccagggagccgagtggtcttgctcagcagatcccacccccatgaggcccaaaaagctaagatccactggcttgaaattctcgctgccagcacatcagtctgaagtcaaattgggatgcttgagcttggtgggaggagcggtgtccaccaatactgaggcttgcaaacgcagtttgccccttacaatgtaaacaaagctgctgggtggttcaaactgggtgcagaacccaccgcagtgcggcaaagctgctgtaaccagactgcctctctagattcctcctctctgggcagggcatctctgaaaaaaaggcagcagccccagtcaggtgcttatagataaaactcccatgtttctgggacagaacacctgggggaagggctggctgtgggcacagcttcagcagacttaaatgttcccgcctgtcagctctgaagagagcagcagatcttccagcacagagcatgagctctcctaagggacagactgtctcctcaagtgggtccctgacttcgtaactcctgactggtagacatttagcagcaggggttgacagacacctcatacagaagaactctagctggcatctggcagttggccctctgggatgaagcttccacagcaatctttgctgttgtgtagcctcggctggtgatatccaggcaaataaggcctggagtggatgtccagcaaactccagcagacctgcagaagtggggcctgagtgttagaaggaaaactaaaaaacagaaagcgatatcatcaacatcaacaaaatggacgcccacacaaaaaccccatctgaaggtcaccaatatcgaagaccaaaggtagataaatccacaaacatgaggaaaaaccagtgcataaaggctgaaaattccaaaaaccagaacacctcttgttttccaaaggatcacaacttgtcaccaccaagggaaaaaaattggatggagaatgaatttgacaaattgacagagtaggcttcagaaggtggtaataacaaactcctctgagctaaaggagcatgttctaacccaatgcaagaaagctaagaaccttgataaaaggttacagaaactgcaaactagaataatcagtttagagaagaatatatatgacctgatggagctgaaaaacacagcacagcaagagaacttcgtgaagcatacacaattatcaatagctgaattgatcaagtggaagaaaggatatcagagactgaagatcaacttaatgaaataaagcatgaagacaagagtagagaagaaagaatgaaaaggaacaaacaaagcctccaagaaatatgggactatgtgaaaaggccaaacctacgtttgattgctgtacccgagagtgacggggagaatggaaccaagttggaaaacacacttcaggatattatccaggagaaattcctcagcctagcaggacgggccaacattcaaattcaggaaatacagagaacaccacaaagataatccttgagaagtgcaaccccaagacacataatcattagattcaccaaagttgaaatgaaagaaaaaatgttaaggacagcaagagagaaaggtcaagttacccacaaagggaagcccatcagattaacagcagatctctctgtagaaactctacaagccagaagagagtaggggccaatattcaaccttcttaaagaaaagaattttcaacccagaatttcatacccagccaaactaagcttcctaagtgaaggagaaatagaatccttcacagacaagcaaatgctgagagattttgtcaccaccaggcctgccttacaagagttcctgaaggaagcactaaatatggaaaggaaaaactggtactaggcactgcgaaaacataccaaaatgtaaagaccattgacactatgaataaactgtaccaactaatgggcaaaataaccagctagcatcataacaacaaaatcaaattcacacataacaatgataactttaaatgttaacaggctaaatgccccaattaaaagatacaaactggcaaattggataaagagtcaagatccattggtgtgctgtattcaggagacccaactcacatgcaaagacacacataggctcaaaataaagagatgaaagaatatttaccaagcacatggaaagaaaaaaacagaggttgcaatcctagtctctgatgaaacagaccttaaaccaacaaagatcaaagaagacaagggcattataaaatggtaaagcaatccatgaaacaagaagagctaactatcttaaatatatatgcacccaatataggagcacccagattcataaagcaagttcttagagacctacaaagacacttagactcccacacaatgatagtggaagactttaacaccacactgtccatgttagacagatgaacaagacagaaaattaacaatgatattcaggactcttgaactgagctctggaccaagcagacctaatagacatctaaagaactctccacccaaatcaacagaatatacattcttctcagcaccacaccacatagcacttattctaaaatcaaccacataattggaagcaaaacactcctcagcaaatgcaaaagaatggaaatcataacagacagtctctcagaccacagtgcaatcaaattagaactcaggattaagaaactcacttaaaaccacacaaccacatggaaactgaacaacctgttcctgaatcattactgggtaaataacaaaattaaggcataagtaaataagtgctttgaaaccagtgagaacaaagatacaacacaccagaatctctgggacacagataaagcagtgtttagagggaaatttctagtactaaatgcccacatgagaaagcaggaaagatctaaaatcgacaccttaacatcacaattaaaagaactagagaagcaagagtaaagaaattcaaaaactagcagaagacagtaaataactaaaatcagagcagaattaaaggagatagagacaggaaaaacccttcaaaaaatcaatgaatccaggagctggttttataaaaagattaacaatatagatagactgctagccagactaatgaagaagaaaagaaagaagaatcaaatggacacaataaaaaatgataaataggatatcaccactgattccactgaaatacacactaccatcagataatattataaacacctctacacaaataaattagaaaatctagaagaaatggataaattcctggacacatacaccctcccaagactaaaccagcaagaagtcgaattcctgaatggaccaataacaagttctgaatttgaggcagtaattaatagcctaccaaccaaaaaaagcccaggaccagacagattcacagctgaattcaatcagagttacaaagaagagctgataccatttcttctgaaactgttccaaaccgtagaagaagagggatttctccctaatgcattttatgagtccagcatcatcctgatacggaaaactggctgagacacaacaaaaaaagaaaatttcaggccaatatccctgatgaccttcgatgcaaaaatcctcattaaaatactggtaaaccaaatccagcagcacattaaaaagcttatccacaactatcaagtcggcttcattcctgggatgcaagcctggttcaacatacacaaatcaataaacgtaatccatcacataaacagaaccgatgacaaaaaccacaagattatctcaatagatacagaaaagtctttgataaaattcaacacccattcatgctaaaagcactcaataaactaggtattgatggaatgtatctcaaaataatatgaaccatttatgacaaactcacagccaatatcatactgaatgagcaaaaaccggaagcattccctttgaaaaccagcacaagacaaggatgctgtctctcaccactcctattcaacatactattggaagttttggccagggcaatcaggcaagagaaagaaataaagagtatttaatgaagcagagaggatgtcaaattgtttctgtttgcagatgacatgattatacatttagaaaaccccattgtctcagcccaaaatctcaagctgataagcaacttcagcaaagtcccaggatacaaaagaaatgtgcaaaaatcacaaacatccctatacaccaataatagaaaaacagagagccaaatcacgagtgaaatcccatttacaatttctacagagaataaaatacctaaatatacaactcacaagggatgtgaaggacctcttcaagaagaactacaaaccactgctcaaggatttaagagaggagacaaacaaatggaaaaacattccatgttcatggtttggaagaatcaatattgtgaaaatggccatactgcccaaagtaatttatagatttaatgctcttctcatcaagctaccattgactttcttcacagaattagaaaaaactactttaagattcatatggaaccaaaaaagagcccatataaccaagacaatcctaagcaaaaagaacaaagttggaggcatcatgccacctgacttcaaactatactacaaggctatgataaccaaaacagcatgttactggtaccaattacagatatatagaccaatggaacagaacagaggcctcagaaataacaccacacatctacaaccatctgatttttgacaaaactgacataaacaagcaatgaggaaaggattccttatttaataaatggttgggaaaactggctagccatatggagaatactgaaactggacctcttccttacaccttatacaaaaattaactcaagatggattaacaacttaaatgtaagacctaaaaccataaaaaccctagaagaaaacctaggcaataccattcagtatataggcatgggcaaggcttcatgactaaaacatcaaaagcatttgcaacaaaagccaaaattgacaaatgggatctaattaaacgaaagagcttctgcacagcaaaagaaattatcagactgaacaggcaccctacagaatgggggaaaatgtttgcaatctatgcacttgagaaagcgataatatccagaatctacaaggaacttaaacaaatttacaagaaaaaaagaaacaaccccatcaaaaagtgggcaaagaatatgaacaggcacttctcaaaagaagacatttatgagaccaacaaacatatgaaaaaaagctcgtcatcactggtcattagataaatgcaaatcaaaaccacaatgaaataccatctcacgccagttagaatggctgtcattaaaaagtcaggaaacagcagatgctggagggcatgtggagaaatatggatgcttttacactattggcggcagtgtaaattagttcaaccattgtggaagacagtgtggtgattcctcaataatctaaaaccagaaataccatttgacccagcaatcccattactgggtatatacccacgtagaataagtcattctactgtaaagacacatgcacacatatgtttactgcagcactgttcacaatagcaaagacttggaaccaactgaaatgcccatcaatgatagaccggataaagaaaatgtggcacatatacaccatggaatactatgcagccctaaaaaagaatgagataatgtcctttgcagggacatggatgaagctggaagccatcattctcagcacactaacaaaggaacagaaaaccaaacacccatgttctcattcataagtgggagttgaaaaatgagaagacttggacacagggagggtaacatcacacaccagggcctgtcagggggtggggggcaaggggagggacagcattaggagaaatacctaatgcagatgatgggttgatgagtacagcaaaccaccacggcacatgtatacctatgtaacaaacctgcacattctgcacatgtatcccagaacttaaagtataataaaaaataaatgttctactttaactcacatattgtgtagatcttacttaagatggttggaggcagggtctcctggtgttgctttggtgattcaacaatgtcatcaaggactcaggcctttcattctgccttctgttacccttggatatttgtccttcatgatggtagtaggatgactgcattttcaaatcttttgtcctcatgaaatattagtgaatgcaggaaagaaatggaaaatattaaagagctttctttctttccctttaagtctctcttttaccactaaggatactgttttccataattcctcctattaccctttttttttttttttttttgagacggagtctcgctctgtcgcccaggccggactgcggactgcagtggcgcaatctcagctcactgaaagctccgcttcccgggttcacgccattctcctgcctcagcctcccgagtagctgggactacaggcgcccgccaccgcgcccggctaattttttgtatttttagtagagacagggtttcaccttgttagccaggatggtctcgatctcctgacctcatgatccacccgcctcggcctcccaaagtgctgggattacaggcgtgagccaccgcgcccggcctaccctattaccctttctctcacattcccttgccagtactggatcacatatcaacctttagtctaataaaggagaatgaatttaccataagggacttaaactaatcataacccataccctggggctattcacattgctgtttaaacaaagcttagccccataagaaatgtgggcaagactcttaggaaagcaaccaaataccttcaaccaaaataactgtcaatattaaacatatgccctaatcatacttctttattcatttaatttccatacaaccctgtgaaagaaacctcagctttatctctggcattcgtgtaagttaatcaacatgttcaaagtcacacagctagagattggtggagcttgagtttcaattcagtctgaatattgagctgaagttctaaattaggactctattactttccaacagttcgactttgaattcagacacttctaaagtaacaagaaaatagctctacaatgaagcaaaagtatctcaatgatagtttttggaaaatacctcttaaaaaaaatttttgcactgaaaatttagctctcaagaaatgtgaagggggcacagttgatgtaattcagggaagacagcatgaaacacaaaaaaattaacgtattattaatttgccccaacctggactacaaatccgtttttcaaaataaattatggtttaatatcaaatgatgaattcttactaaagacaatatacattttcagttataaattatggcaaaagttataaagatttcaaaattacaggaaaaaaatcactactgctggctattaatttctgccatcctcccctcctctgttacaatgtagaatgtcttttgtagcaatatcattaccagatcaaggagtacaacagaagcctcaggtactgaggttttctgcttttgaactagaacatgcatatttctttttctcacaatggagcagctgatccagggcatatgagcagactttgcctggattttctttttagtactctctgtgggtacttgctttgaaacttacctggagtcgcgaaaggagtaggctgcagtgagaagaacatgatccttgaaatcatgtgaaacctaatttgaggacttgctccatttcttgactcagagtaacttggactggttatgcgtcatacctgagcctctcttcccacagctctaaagtcaagtgtatgagtattagcagtggggatggggaaaagaacaccacttctgaggaaattgcaaacattcaagttttaagctatgtaaactatctagcacatagtagggactccataaaatattagctttctgcagaattttttctccagtagatgaagtcaggcttccaatccctacattttactcactggttgctcattctctaaattgacaaaatggatcacatacggttccctctaattccctcctgtccttttccttgtttctacttcactccttctccaacttatttatatgatttcaagccttcaatgccccacaaaatttctaaaaagataaacatgcagattgaatctctataattattttctaaaggaaacatctcttccagggtgttttaaaaatttactaatacttttcaggcaagctcttcctatttgctctagctctgtcttccagctcattcttttctagttctatccctccatttcctccacttcttttctctataaattcctactgatgtagcttcagggtcccaagactgttggaattataataataaccttaagttatttacattccttattactaatctataggtcatcttgagaatttcgctaagatgctttaattgcatatttaaaaattgcaagccaacttcatttgatgtaatgttaattcagaaaataaatattcagctacaatagatacagtcaattttcaatgatttcagtaacctaattcagtaagtaagcacgtaattctaaagatcacaaaggagagacattgttttacactgtctttcctataaaggttgttatatagctctcataattaattaaagcatattcaatgttaacaatttttcgggtatactttttcacttttcttagtctcatacaagtgaataattatgaagcctgacattttatcctgaataagtcataactttcaaataatcctttattaaataacatatataaaatatgcaaattataaatgtatagctagtttatttcaaaaatggaacacacctgcataacagacacactgatcaagaaataaacttgaccagtacattgcactgtgttctattagatatattaagtgattcattctaaagatgtgacctttcacgattgagggagctggttaaacccatctgtgtaaggctcttgtcttcatgtctgatgccagggcttgaagtccaccaggcaagcagtcaggaagggaaggtgacataaagtcgatgagggctatggcaagccagaactcacaggtataagtggaccccacaaaggtgccccgggatctgcctcaattcttactcattccaaccttcatgctatgatatcttgtggagaagctggcaccctttctcctggcactaaccatccagatgactcaggagttagaaagtctgaagaggaatacagagcggttgcatttgcagtcccctctgctcccccacagcaagtagataaacctgcagacaaagtagtaacatgtgtgaggtactccaatgcctgtctgaacttttgaaagcaaaaatcaaaatgattgcggctcctcttctgacttcaaatattatgtgaaaatatgtcttgtggtccaccctatccaaaaacacagagagaaaggaattctgagaaacgtggctaatcacagttcaattgacattttacaaagccaccagaaccagtaactttgttatccttgagaaccacatgtggaaaagggagataactgggttggcgcaaggccactcagagaaccctcttgaatgtgtaatggtagtatatgaatgcagtcttcaattatatttccataacagttaaataggatacactttcatatgtcattggccattctgacattccgttttctgaagtgcctattcaagtattttgcttttgtgagggaaggggtgtgtcttggtctatcactcttttatggatttgtaggatgtcctcacatttatttcagatacgagtcatttgttgacaaaaaaataaagatatatagatatatatatcacatatcttttagtattctctgggttgcctatttgttgtcttaataaatgtccatgactttttgacttatgtaacagggagctctagatttaatacgaaaccaaacacttaattggaaagtagatcaaaatggcgaatccaatatattaaagaaaatatttttaatctagatagacacacttaaaattacatgcctaacaaattattatagtttgtataattatacattttataaataatcttttagaatatttattttaaaatgtgtttaatatgattattaaatggttactataatatgcagagcaaaaggggagccttaagtcttttttaaaaaactaaaaatgtttttgatgaaaactattatttaacttcataaaatgaaaactaacatgagaggaacataattataagataaacagtgtcacatggtattaaaataataaaacacatatgcaatgggcactttacaacacagataaatcccctctaggttactgttaggagagccaaagtaacattttgtatctgattttatttattcaactttttacttcttttcctgctcatgaattttacattccttttccctctctttccctatcctttcctcatccttttccttatttatgtacaagtatctcaggatttctaataaactaaaggaaaatccattacttaaacaagcttcatcaggctcttagtgtaaaactctattagctttaatacaacacatggcaatttgcccaaggcagtttctctaattcagtgcctagaaatatccagtgatttaacttcagtgtctgaaatcaccaaagtactttcccattccaccaacagaataaagctgacagctcataaaagccatcttttgccccttctagttatttttctagttaaagatgagctccatgacctaattgccatccctttgcattctaatctagtatttgaggacagcaataaagatgtaggttgtttcttatggataatttcctaaaaattgagtgtttttaagtatgaacctaatatatttcctgaaggacttaaagcctccttgtggtttattggtttgttttagaaaaaaaaaattgactttctaaaataaaatatctatccacatcgaaactagtagggaaattgatatcaaaattgtcctcataaaggaggggactatatccatcaacaaaattcatctatcagtgttcctatttgcatgaccaagaacatccaaactgacttgataacaaaatgtgtaattaaatgtttgatttgataaattcatcaatttactcaagttacgcatagactggttgggtcactgctgaataagccaacacaaatattgctggcataagttgagacaccacttataacttgggtacaattcggctacatcgtttgcttcataaagtattgcttgacccaagaaactatcaattcatatatcctatcccaatatatagctcagctgtggaatgtcacagggcttcaaaaaagtagacgcttcccagccttaaaaaatatgcaaccactcagcacaacccagcccaatccccttgagccttctcaagttcccatgacactttcttaaagtcattgcacccacattcacatttgctattgtcagaagaacaaagaaatctctattgtactttgcaagtgactgcaatctgcttctcattacacctaggtaaccgtattaacatcagaacaccgtaatccctacctacactccaatctgttcagcagcatctatccttgagaggttcaaaggtatttgagatataggaaaaaccaaagtgttttctctactctcccacaccactccccactcaacacagtacttctcctccaacatagatgagtgacttttgtttttgctctttctacatattaatctattttccagcaaagaccaactgggtgttttataatttaattctattctgacattatctatcacagtctgcgtggagttagagtcaaatctgagaagttatgggctcagtcttcgtctgcaaagactgggcctgcttgggctgccagttgtaagtcccaggttgtgacttgcacttctgcccaacttctggctataaatcaggggtttccataatcccttccttggatttgattaatttgctagagcacccctcagaactcagtgaataaattacttatatttatctatttattataaagaatagtattaatacaaagtatacagatgaacatccagacgaaaaagatgcatagggtaaggcctaagagaaaaggcatgaagtttccatttcctccttgggtgcaccccctccaggcacctttgtgtgttcagcagttcagacgctcttccccaacccaatctttttgaatttatacgcagggcttatttcataggcatgattgattaaatcatgggccaccttctcctccctgaagttcagaagtggcagtgaaagttccaaccctctaatcacaaggttagtttccctagaaaccaaacctcacctgaggctatccagtaatccttaaagaatagcttcattagagcaaaagaggcttctatcacttccaggaaactccaaggaatttaagctgtttcccaggaaatggtgaagaagatcacatattcatgtttttatataaatcacaatattacaaatagtgataagattgtcaatcaggaaccaaacaatagctccaatttgcttccaatcagtccagagataaatgggtgctaagtcacagctattctctagattatctaatgtagtctttagacagggcctaaaatcaataagcatctaatttatcttctccagacaaaataggtcatgtggtctctcccagtatgagctgtgtgttttgctacatgtgagacaaaagtacctaagcatattgttattttttgtagatattctttcaggtaaagagctactacttttttcctgacatcatgatctgtttttgaattttgttgccttgtctgtcatagtccccctctttcatattctaataatttttatccatatccttcttcctccagtagaatattctggttcagaaatactggctaccattgagctggcaataacattgttaaagcaggacttcttccttcacccaatttccagtgtgatttgagaggtaaaaattacaagaatgtccctgaaacttggcaaggggatcacattcacaattagcctcaatttagcaataaagaatgaggttcaatccacccccaacgttccatttgtaccatatggagtccaatacagtgttgcaattgtcatgttatatacagtgatgcctcctgatacttgtacaagaaagcaaatctcttgccctgaaataaactagaataaaatgaaagaaaaaaaatctgagataaagaagatatacatatgggtagttttgtcatctcccaccccatcatttctctgtcttgtggagtagcccctagagcacctctcatatcaacctaagacattgattttcttgggcattctttcaagctcctttcttcttctattttacataatatcttttatttgcacattccgatttttaaaagaccactgctacattgttgatatgtcgaatgtgagatgtccttatgtatattttttccttatatttttatgacagtttgttgctgttgttagtggcaaaaaaatactgtcaatatataagcaaaaccattcagagacaaaactgtcatctttactaaactgaaagaagaactattttacagaagctctataggcttaaataaatgatgtcacacagaaacccaggaagaaagaagaccagaaagtctaaatatgttagtaaatataaatgatctatgttcaagatcagtggctttcaaccacagatgagggcaattttgtccccctcttcatagagggcagtgtttggaaacattatttttattgttatgactggagtgaggaagggatttgctacttatatctaatgggaagagaccaggaatggggctgaacatactacaatgtacaggatacttctccccaacaacaaagaagcatcaagtacaaaatgtcaatagtgacaaggttgagaaactctagtctctttcaatgtacgtctccttaaagactgttagctgctaaagcaaagccaaaaaatgtgtaaaaatagaaatataaaaataaatatacaacagttcgaaatgcagtaagtagtgatagattgttataaaattattaaaaagatgaagtaatataattcttgtaatagaaaccaaatgaattacagatgtgtactgaaatctctaaaggacccatcataaaataacacaaataggcttagctaaaaaacttatcagaggagataaaatggaacaatgaacaatatttgattcaactttcaaaaggcagcacataaataataaaacaaagagcaaatgagaaacatagaaattaaatgtcaacaagtgaacttaaatcaaaatatgtcaataactgcttgaatgtaaatagcctacaaacctaactaaaaggcagatattgtaaggactggtaaaaatgtaagaccttatatgttattctcccctctcccctcaaaaatcacaattgatacctaaggacacaaacaaattgaaagtaataccaaaaaaaaatacatgcaaaaactataggtaagaaacctgttgcgactatactagaattagagaaaatagattgtcaagaccagaaaattactagagattttaaaagtacatttcataacataaaagatcaattgatcaagagaatataaatactgtatgtttgtgcactcaataacaaagttcccaagtatatgaagctaaactgacaaactttaatcccttctctctgatgaattgtaaaagtagacacaaagtgggcaaggatatggaaaatttgaagaacactattaaccaacttgacttaatgaatgtatataaaacactacaccaaacaaaagaagaatacacatccttctgaagtggaagaaaagttaggaagtatagaataataatactagacaactagagaaaaaatggaaataatgctttgctatgaaaatctagaggtcatgagaatttcaaatattttcctcatgaatatatatctttcaagtatgttgaaagaataaaaataaattaatgaaatcatatgagggaattgtattgaaaaagcttactgacattaaaatatggcataaagtgcactgatataagtatatatgaacaaatttaagatatttagaaaatatttagaggagttacagtaaatgtatattaatacattagcaaacgttgattttgatggttttgaacaatgggggctgagtcctataaatttttggcaagaggaaattgcattgctttcacgttaaaagaagatcatagtccataataatagaaagtatatggtgagattgatccaaagtctcatatggaggcatattttttaaaaatccagccaggtacagtggctcatgcctacaattccaacatgttggaaggctgagacagaaggattgcttcagcccaggggtttgagagtagcctggggagtatgatgagagcccatctctacaaaacatttaaaaactagccaagcatggtggcacatccctgtggtctcatttacttgtaaggctgtggcaggaggatcctttgagcccggaggtggaggctgcagtgagctgtgttcactcctctgtattccagccttggtgacagagtaagaccctgtttccaaaaaaaaaaaaaaaaaaaaaaaacccacaaggaaacaataaaattggatatgcatattatgaattagatatgcaatatacataaatttatcaattaattagtttcattttaaatcaaaaattatataatatgcttctttgtattgtcccaggactttgaatatatagtaattatatattactttgaaatattttgctaaacaagacactaatgacagtaatgtaattatttttcttagtaagaggtcttacatgtgctagctaagcatttgttgactgaacgaatgtattttatccatgtttatcttgaagtttagaatatataattccattagggccaaccatcattgaggtcattgtgatattgctattttaagaacatattagtttgcatattcagtttattttgaacaaatgcataaagtatcagaaaaacacaaataaactctctaaatgcaactgttaaaaaaagaaattaccacagagcatgcaattattgcattataaccatgaaaaattaaattacagtttctgttcagtattgaatttttcactttttgatattagagataaatcacattttaaatttaattagtggcaatacgataagagaagtttttgaagtcaattttttcaattaaaatgaaaatttgaagaaatagcaaacacagagcaaattttctcactgttctttattgaaaatatgcctatcaataattaaagggttattttatgacacattgtgccttgcataaatctcccatgtgactgttatttgtaatcctcacaataatcacttagacaactttggcctataaacacttaagatcagtagtaaaacaaagacatttatgtcaaatattgacatgtgtatagcatgtctattttatgtttatttcatcacacccttctgaaggatgtctttattcagccatagaaacacaagataatacaagtcaaggacactttagaaaccataaaatctaatcttatgttaattttaaaacacagaaaactgaggttctagagaagataaatgacttgaacaaggtcaggaagctaatctagggcagagcaaggaatcatatgtaaacgtgaaaaaatgactaacctcttttatgttgggcaaagaactgtgtaaattttctcggcatgcatgagtgattttcaatctggtaactccgtcataaaattcaacaaacttgtcagcaccaagttgtttcagattttacatagcatgttgatcacaattcattaataatttctttccattatgaatttaaaatataattaaacattgatagtcattatcaggactgaacacatggtgtatgcattgccatttctgctggtaaagtcagcatctgagctgttctaacgataaaaggggaaagaacaaacaaagtgaagagagttgacatccatgtgatgctgaaaatattacgttataaagctggctggatatctgaaagttacagacctagaattccgcttccaagtgaaagcggcagctggctgaagaacagtggacaaagagaatgatgaatcaaatcaaggtttgatgtaaagtagaacacagggagcaaacattttagttcttttgtggtaagatttatttccttcccgtttttcagagagtaaaaaactgcttcagaatgctatgcacactattgtatcctgcccactgaatttccttctttacgcttttttctcatttatttcccgtgagactaagtcctacctcctagtcctgtgcatagtgtccaagcggttgcatttatttattctgaaaggaaagtttgtaaagaaagttgtaggaaatgggaaaaaaaaagatatcatattctttccttttttcacttcagctgcaagacacaaataaaatatttgggtaaatattactcgttttgttcaaaatatgtttttctaaaaaaatgtgtaattacgttgtgataattttggagatttacggtgatgcaaaaataaagaattggtgttaggatatttgaattttattaatgttagtcatttccttagatgaaaattaaaatgaagagctaaaaagtatgacgttgctaagtgttttttatcgtttaaaaatttctagcaaatccttctgtaaaagaaaggtgttcattatgcaaaaggttaccaacaaactcttttaaatgtattcatttttcttgtacttcaaaggttgtcatcaaatattttaattagtaagtgggatataataatctaaaggtgggctggacgtggtggctcacacctgtaatcccaaaactttgggaggccaaggcaggtggatcacaaagtcaatagttggagaccagcctgaccaacatggtgagacgctgtctctactaaaaatacaaaaattatctgggcatggtggcaaacacctgcaatcccagctactcaggaggctgaggctggagaatcgcttgaacccaaaggtggaggttgcagtgagctgagattgtgccactgcactccagcctgggcaacagagcaagactccgtctcaaaataaataaataaatacaataataataataatctaaaagtgttattccagttgatcactgctctcacttcaagaaacagttgaattagtttccatattttaacctatatcatatatgataagccccgtactaaaaaaattacaacctgatcttggctacaacatgaccataacatcttagcaaaacagaggctgcaggaaaagtacaagaaacattatctagaccaaatgtatgtgaacttttaaaaaattagtcactgtcagtaggcctgtagctatgaaagtcatattaagaaaagaaaataatacaaagttgagtcactgaaatgcaattcacatttgattcataacttaaaccttttattaattattgctttatcacttaaaatatgaagaactggaaattctacattatccagtgatctgtattttaaaggtgttattttaccgatatttgacatttgattctaggtgccttaaaatgtatcatataatattgaagccattctctaccaaagaaaccagattgatgaaaagctatggattagatctcctgttattccctctactattccagaagtacttataatactaaaagaaacaaatactcattcttagaaaatttttctaaaattttatcatttccaaattttaggaatgttgtagcaatcactatagataagaggcagtgtgacagtttgtaagttaaaaaaaaagaaaataaaataacactgcactaatttgaacatatttagagatgaatagcaaaccagagggaagagaccatgatcaggaaaatccttgataataaacaatgaagaagtatttcaggcagttcttcacagtgtgatgtatatgtgattattatctttcagtgtgaacaagactccaaaactttaccagaaagagagaggggatgtggcctactagcttttcccaaagttaccccattgttaatcttctttgttcctttaaggataaaaacactgtgtatggtagcaggatgaatgatcaagctagatttggggaacgggaggaagtaggtgttttcctcatatatctttgataagaagtatgaaagtaattttgttgttgccaagttcacatataaatatacctgttttagagatgcagccatgcattgtttaaaaatggagatatgttcaaagaaatgtatcattagagtattttgtcattgtgtgaacatcatagagtgtgcttacacaaaacaagataatatagcctactacacacctaggctatatggtatatcttattgctcctgggctacaggccttgacagcgtgttattgtactaaatactcaagcaattgtagcacaccgaagtatttttgtatctaaacatatctgaacatagaaaaggtacagtaaaaatatgatattataatcttatgggatcactgtcatatatgtggtctattgttgaccaaagcatcctaatgtagtgcatgactatagcttattaatgttaaaaattaatattggggaattaaatatatatttcataccatgaatcataatagtatacttctctgaatgatataagcctactatctttgggtttaatttgttttcatccatgcttgctcaaaagaaaaatcagcattgcttgtttctctgctttattgaaactgtaatttgagatggaatgtcattgcatctcattgattattatttttataactatttaaatacgtttttgtgtatatacatttatatatatttgtgtatttcataaatatctatcatctatcttgacatgtttaacttttttctgctaaaatattctaaaacctaatcatgaatttgagtttgaaggttagcatgaagatttttgttgatgtgaaacatttttatttcttttttcagctaaacatttgtttgacaacatgcaagttcactttgaaaaccagaaagattaagtgcctaaaatttaaatacagcagcattttcaacagagcatgctgtggcaatataatgcatttagaattaggattacagaggtgaatttcacttcatattcaaatcacattctaactagagtgataattacataacccagtgtccatattcaaattacaatctaactagagtgataattacatagcctgatgtccagaattaaagagaagagttactcaaagtcaaccagtataatgtatatatagaagtaaatgtatgcatgagagtgcgcatgtgtatatgttttaaccccatcagaaactggatttcttatttttcataatttttagagagtatgcatcttagtaagtaaaaacaactacagcattgactaacaaatggtagcattaagaataaataaactctctaccaatattaccaggaaacattagagcaattagaaataaatataagatggtgcacagaaagaacatacacaccgtggtcaaatagatctgaattagatattctaatacataaaaatgtgagttcatgtagcaataacttaacctccttgagcctcatttttttcattttaaaaatatggattataaaagtctctcaagattgttagcagaatataaatcatagataacagatgatagataaaaatatagtttgtatttataacccttagctagaatttatagattatcacaggaatttactacatagttgctacagttattattactaagtgtattacttttaagtctttgttatttgaaagtgtcattaactaatatctattgaacaacactgattgactgattgattgattgagacagagtcttgctcttgttccccaggctggagtgcagtggcacgatctgctcactgcgacctccgcctcccgggttcaagcaattctcctgcctctgccacccaaatagctgggattacaagcacctgccaccatacccggctaatttttgtatttttagtcgagacagggttttgccatgttggtcaggctgttcttgaactcctgacctctggtgatccacccacctcggcctcccaaagtgctgggattacaggcatgagccaccgcgcccagccttgagcaacattaattaaacatatactatatttgtcagaagttcagtttattactacaggaataaagccaatgggttatggtgctcaaatttctcatgttcttagttcagttcctctacaatatttgactaagtatatattctgataattaaatattctaatagagacagtatctgtagcacacgtacctctaattttaaataattgcaatgcaaataataatttataaataaacatattatttcatatatcagtgactattcagaaaatacttggttatgattacaaacttctttcattttgcaatgaaaatgagtaatgaaacattggtgaatgtattttaacacagaaatacctcttgcaagttgttatttgaataattcaatatcattaacagtttaaagtttcattggctctttctactgtatagttgaactttcatgattaataggaaaggactccatgttgccaaatataactcagccaattataacatttgaattaaaaagtgagttttatttcaattttctttcaagttaattctgatttaagattttattttcttctataattagtttaagtaggtgtttttgcaacacacatttaattattgcaacgaataactaaattttaatagaagaaattgcatagttttgttctggaacaacagtttttaatgtcaaattaatgatttatacatgtattgcgtatgcatactttaataatggtagaaattgacatttttaattttatgtatgaattctatattctaaattttgcatgaatttgcattgacatttaaatctagagtttatcatatggaatgctcaataatgtaaaaataatacatttatttttagtttttttatgaaagccttatccttaggataaatagataatcaaaataataagaactatcattattgcttttatgtatttccactaaaaataaggcagtttatatctatctagtatttatcatagacatggttacttgtgtgttaattttattattttcttaatctcaaaagtgatacatggatacccaagtaaagttacatgaaagcagctaagcaattttttaatgatcagcagaaaaccaagtttaatgtgaataaaataaaaagcagtgataaataggacaaaagagggggaagacgaaatcctgaatggctattacaaaagactcccaacacaggacattaaaatgggagccactgatgagttcaacagattccaaggattcactactatctttaaatctgttgctaacctcagggaatatttatttatttatttattgtcggggggtgttttttccttttctgataattaggtggaatgatttactgctgaaactgaaagaatacagacagagcaagaaaagcacaccaggatttcatataaacagggaaaaaatctgaagagaaaaggcatacaaatatttctctactatctggataaacaaacatgctttgtgcaggaaatgtaacaaattaacagatgaggaacagtagcaaaatattccaagaagtattgacacaaatatagttgagttactcacaacattcaagctacagaaaagtaaataaaactgttgacttttaactagagggaatcaaactccattaaatataatgcaatgatagtaaaggaaaattaatttgataatagattatttggtgaaagttgattatgttaagcataatacaaattcttgaaatatattacaaacacgaaaatttaaaattatctagcacatagaagaaatgcaaagaatccatccgagaaggaacgaaagaagataatactgctcttcaacattgcagtgacagtattagatcactgaggcagaaaactatcaaagatatttgggacctgaactcagcacttgaccaaatgtacttaacatacatatatagaattttccacctaaaaacaacagaatatatattcttctcatgttcacatagtacatactctaaaatcgaccacacaattggccatgaaacaattctcagcaaattaaaaaaaataaataacaccaatcacccgctcagaccacagcacaataaaaacagaagtcaatactaagaacatcaaaaccatacaattacatgaaattaaacaacctgctccttaatgactttggggtaaacaatgaaattaagatagaaaacaagaaattctttgaaacgaatgagaacaaaaatacaacttaccaggatatagctaaagcagtgttaagagaaaagtttttagcactaaaagctcacatcaaaaagttagaaagatatcaaataacaacctaacatgacacctagtagagctagggaaacaaaagcaaacccaccccaaagctaagagaagacaagaaataacaaaacatcagagctgaactgaatgaaattgagatctaaatacaaacaaaagatcaaaaaatccaggcagttttttgaaagaataaataagattgatagacttctagaataataaggaaaaaaagagagaaaatccaaataaacaaaatcagaaatgtcaaaggtaccagtgactccatagaaatacaaaatccctcaaagactgctatgaacacccctatgcatataatctagaaacctagaagaaatgcataaattcctggaaatatacaatctcctaagactgaaacaggcagacattgaatccctgaaaagggattgaatgagttacaaaattgattcagtggcaaaaagcacactaaccagaaaaggcccaggaccacacagatccacaactgaattccaccagatgtaaaagaagagttagcgccattcctacagaaattattccaaaaaactgaggatgaaggacttccctaactcattatatgaggcctgcatcattctgataccaacacctggcagaggcacaacaataaaaaaagaaaacttcaggccaatatccttgataaacatagatgcaaaaatcctcaacaaaatactagcaaaccaaatccaggaacacaccagaaagccaatccaccatgatcaagtagactttatccctgggatgcaagggtgattcaacacatacaaatcaataaatgttattcattgcataaaaacaactaaaacaaagcccatatgatcatctcaatagaagctgaaaatgcttttgaaaaaattcaacattgtttcgtgttaaaaacccataacaaactggcactgaaggaacatatctgaaaataataagagccatctatgacaaactcagccaacagcatactgaatgggcaaaagctggaagcagttctcttaaggaccagaacaagacaaggaagcccactctcacctctcctatagaagaaaatactggaagtcctagccagagcaatcaggcaagggaaagaaataaaatgcatccaaataggaagagaggaagtcaaactaaccctgtttgcagatgatacgattctatacctagaaaaaaaacatagtctctgcccaaaagtttctagatctcataaacttcagaaaagtttcaggatacaaaatcaatgtacaaaaatttctgtacaccaacatttctatacaccaacattgctgcatttctatacaccaacaatgcctggcctgaaagccaaatcaagaatgcaatccaatttacaataaccacaaagagaataaaatatctaggaatacagctaactagggaggagaaagatctctacaataattacaaaacactgctaaaagaaattagtgataacaaacaagtggaaaaacattccatgtacattaataggaagtatctaaattgttaaaatggccatattttccaaagcaatttacagattcaatgctattactatcaacctaccaatgacattcttcacagaattagaaaaatctattttaaaattcataagaaaccacaaaagagcctgaatagccaaggcaatagggcaatagtaagcaaaaaacacaaagctggaggcatcatgttacttgaattcaaactgtattacaggactagagtaaccaaaacagcatggtactggtacaaacacagacacatagaccaatggaacagaatagagaaataatgccgcacaagtacaaccatttcatcttcaacagaacaaaaaaaacaaaaaacaaaaaacaaaaaataaaaaaacaagcaatggggaaaggactccacattgaataaatggtgctggataactggctattcatacgcagaaaattgaaactggacacctaccttaaagcacatacaaaaatcaactcaagatgtattaaagacttaagtgtaaaacctaaaactattccctgaaaaataacaggaaatatcattcttgtcctaaaggccgtgacaaacattttatgataaagatatcaaaagcaattgcaacaaaagcagtaattgacaaatatgacctaattaaactaaagagcttctgcacagcaaaacaacaacaaacctcaaagagataacctacagaaatggagaaaattatttgtaaactatgcatgtgacaaaagtctaatatccagaatctataaggtacttaaacaaaataacaagcaaaaaccaaacaaccctattaaaaagtgaacaaagacatgaacagacacttttcaaaagaacacatacatatgcccaacaagtatgtgaaaaaatgctcgacatcactaatcattagagaaatgcacatcaaaactacaatgtgataccttttcacaccagttagaatggctattattaaaaaaatcaaaaataacatatacttgtgaagttgcagagaaggaggaatgcttacacactgctggttgaaatgtaaattcattcagccattgtggagaacactggcaatttctcagagaacttaaaacagagctaccattcaaccctgcaatcccattattgggtattgttctaacaatgaggttattagaacataacaataattataattctacagaaagacacatgttcacgtatgttcatcacaacactattcacaatagcaaagacatggaatcatcctaaatgctcatcagtggtagactggataaagaaaacatagtccatattcaccatggagttctatgcagccataaatcagaatgaaatcatctcctttgcagtagcatagatggagctggaggccattattctaagtgaactaattcaggaacaaaaaaccacatgccacatgttctcacttataaatgggagctaaacactgggtacacatggatacaaaaaagggaacaacagacaacaaggcttacttgagggtggagtgtgggaagagggtcaggatggaaaacctacctgttaggtattatgccatttaccagggtgatgaaataatctacatagcaaacccttctgacatgcaatttacctatgtaacaaccctgcccatgtactcctgaacttaaaattgaaaaaacaaattcctttctaatgctttaaaactggaaacactttaaattcaacaagaatttaattagagttaactagtaaataataaaaaaaaagattgagataaaagagacattggtgagtttacaaaaacaaattgagagacaaaacactatcattataggaaatcaaataaatgaagaaaaagctggaactcttacatatatgacagggttaataggaaaacaattacagtaaatttgaagaaaaactgaaatagaaaatttcctaaggtgtaatgcatgaaagctttaggaatggcaggaactttaggtgaagctccaaataacatccaacatttatataaataaataaatcaaacaaacaaaagttgacatagaactttcaataatacaagttattctgtagaattcaagaagtccttaataagtaataaagaaaagaagagttcatgtgttttggtggttggtaaaggcagaaataagcatggcatcagttttcttcataggagctttcaaagtaccaagacaacagaaaaatgtttacaaaattctcaggaaaaaataaaagagcatgaaccaagaatactattctcagctaatgcttaaataataaattaataagcaaacattctcaattgctgaataactcaaacatggagagagagacttctgagtgataagatttagccagttaagagagcaattcaaatttgaaattccctgagttcccctcccaaaaattgttcatcaccatatcacttatccattgtttgtaacaaattactccaccacttagcagcctaagaaatatcacacatgcatgtttacccactttctgtgcattaagaaaattggtatatcttagctgggtccttcactttaaagttctctcaggctgccatcagagtactggctgagaatccataatccaaaaatccaaaatctgaaatgttccaaaatctgaaactttttgagtgtcaatgtaatgccacaagtggagatttccacacataggtacttaacagaaactttgttttatgcaccaaattttttaaaatactgtataatactaccttcagagtatgtgtataaggttgatatattttagctctgtgtccccacatcctatcactttgggtgtattctatctgtttggaaatagtcactaggtccaaaccagccctaaagaaaggatattatttaagaaagaggatattacaaatagtggatctttaggaagtgttttacaaatggccttccataatctactgcagattcaccattacattgagaactactagaaatcttaggtaaaataataaaaacaaatctttttgagggcattagagaattttcaatgcatcaaagaattgtaggactgatattccaatgagaagggacacacagataattgagtttaatattcagcaacattttgatgaaaaaataaaaaaaaactaagcagagattttcacaaattgtcagagttaagaaaaaatattaacattcaagtaccgtctaggaggagagactttgtttacacacaccagacttttagtttgcaactcacagaactacatcctaggagtaagagaaagccacaagtagaatggcccagtgttataaaattctagtatctaatacaaatgaaataaaagttttgaagtaaaggcaaaagcaaacttggaagatggaagtataattggaaaaataggtaaaagcattttgattacagaacaggtaattttttctcagtcaaaattaaactgctatgcagaaacctcaacttatttcaaaaattatatgttgaaatataggccaaactaatcaccttagaaatagacatacaaaaatataatttgggtgagttgcttcacataaaaagaattttctgtattctaataaaaactgcaatcaaattctcataaaccaagaaatgtacatcaccattgcagttcattgtgttagaagttcacttacacaaaatttcagaataaatgtctacctgaatagttcgcctccattacgtcctaaccagtttgaattttgttttgtacatttacgcagttgtgcttaagtatttatactggaaatgctatagtgtgttttcctgtttatattacgcacatagacaaggtggagatatataacaaaatcgagacttatgtcaccaaaatctttgtaaaatacatcagacatattcaaaaaaagaaacaatattcactgtcccactaagcacttcgtacaattcataactgtctgaaaattacaaaattaaaactataatcatgccattcagagccattcaatgttcatcttctcacctgcagtgatgggagagaaaaggaataagttctgttcaaatgaaacctagtttcataattttgtcatctaagctaacgctacataatatctcaggaatctttctaaattatcagtttacatttcttccacttataagtcatatatataaaattagcacccatgaggaacaaccacgtgccaaaaatctatccattttgccataaagtgtagtctttttccaattccctctaccaggattttctgggatttcacaaatatgcttatctatttcacatggtatctttatggctcacatcaactgagcagcagtatacttactccacactacagtcttttccactttctactgaccactgcttgctgtgttttaaattctcaggcctccaacatttacctccatgatgcgtttccacaagactcatcatgaatcacctttcccatcccttgattccttaaaactcagccatcactagattgtaatttaaaaacgatgaacaatcaaagaaaaaacaaacaaatatttagaaataaataacagcatgtcatcataatgaagtaagaattagttattgttggagcccattgactcatatcatcagaatcacttgctgaacttcatattgtgaagaaacctgacccaaggccgccaaccggttgtccttgggaataggagaaaatccgtttcctctcagctgaaggcctgctttttcactctttgctgtctgaagtactggaggatgaaatgtctattttctcagaaaaaaatcaaaatccactctcccctgcctctgccacctcagactgtgtctcatatctgtgcctcagacatgaccattccctaaactgcaggatagctttaaaagctggtttattcatacttacacagcatttttgttgagggggtaaacagaaatctaattccatatgtttcttaggctcttttatggtgttcctttagtgtcatggggagaaaaactcaggctcgcgttcccttttaatatggtgtggatttctaacttcttgtgagcaaaggcttctacaacaacacaaacccttccctggaaagatgatgttcaagaatgtattagtctgagttttccattcagagaaactgacaaacataaaaacaagcacatcttttgtttaattctcaaatgaagtagttttgaaaatatatctaatttataataaaataactcttttgattatgtctttcattttctgacctataagaaccctgggttcttaatgtgtgatgaagcctgaataaattaggagagtgccttgacaaaaacctgggacatgactgcccaggtatatactgttattgctttctatgaaaataaaattagtatcaaataactttaatctaagggagactaaagaaggtagacctcgtatattggtaaacatgtagcctcaggtaacactgaaaataacaaaatacttggtttgggcactaaagggaaagataaaatgactattttaagtatagacctgagatcttgaacaaatttatatccacaatcgttggtttctttgctaaaagagtagaattatcaccagaaaaaaatccaaggtatgatgactcctttatctattaggctatgtgatttaaaaggatattgtacatgtttgggatcaatagaatttttgtgggtttagccagagacatgatcaggctctttctgttcttgtctttcccaactaatcgtttgcatctgaggtttccactgatatatgacctggttggtgtagtactgagagatctaggattttattcctgtaactattctcaatctctctcaatttctgccttcggctttggaaagttttataagcactaatagttgagtcaaaggcttatagttatttatgcaggatttttcatggctctgatgggttttgtttcagtaaataattgagattctgggttttctggccacataggagggtatgcaaacaggtcaaaatgaagggtagaaggagaggtaaataaaggagcataagacgggaaaacaaaaattgtgagagaaaggttattgggttaagtttttcaaatttttaatttgttttggttaaaatgtcttttaagaaaacaaatgtaaaatatgcattttctttggaaccttcttcataccaagacaaatagaagacaatgggatgttttgcttccttttggtcgccaaatgcctttcaaatggcaaaagaaaagattatgtaaaaaaaaaaaaaaatcccaaagatatcaccaggagcttaaattacctggaaaaactatgacatatagaaagaggcatagagaaatgtggcttataatgtgattatgcatcatgagcacaagtgtaacccacaggacatgcatacttagactgaatcaaacctctgaaagtttggtaatagttggctctaagttttgtttctgcttgttatgtttggagcttgtaaactaaggtctgcttgtcttaaatcctaaacacagcaacctgtgagtcccaggagaaggaaagtctgcaggatggacctctcccagaaccacactcccactgacaaaacaagactaaactaaggaatgttctcgaatgtttttgatatggaattcaaaggaaaatgtgtcctgcagtgatgctgatctgagaagaccgcctgaacacactggcctgaggattgtgctaaagaggaatttcttgtttcctctaccaatcctacttcttataaacttgttcttagagaattatgacaaagaagacagacaagcacaaaaagtaagatttttagtaatgaggcaggtatccaccaagaataaaaatttttcttggcatgaaagtcatgtcaactctgacagttcaatagtactcatattcatttgaatagtcttaatgtgctgtgtggctgtatacgactaacttctcacatatgacctatacatccatgatttatgtaaacaaatgcttaaaaagaagtaccagaaaggtacacactcaaaaaataaagatacatacagctagtgtgacaactggcaacaaagatggtgatcatagaaaactgtcttcatttttgtattctgaaatttgtattttagtaatatttatattttgatggtgtaattaaatgtaaatatatatttaaatttactttttctgggctattatttctttgtactgtcctatagaagttataattaaaccatgtagtgagtaaatttttaattaaaaaattaatcgttcacaaaaatgattttttctgaactatcattattaatattcaaacttaattatctaaactctattaagccaaattttgtaaaaagcatgttcaaaatccaaaagcaacacaaatgctaaaaagtgacaattaaaatagatttagtatagatgtatttaaataacaaatattaaaactaaggtttcagtctcatgtgggctgaatgtggtttctcttagtaagtaaatcaaaaggtttatagcttaattttccaatatctttcatgactcacagatgtttcatagaaactttggtttgtttcctgatgtgttaagttggctatattatatttctttaaattaatgtgtatgtataatatatatgtgtatttttattctcatatacattttaacacatgagagtttgggtgttaataaagatttatatgtgcattggtttgctttggctgccataacaaagtacttagtggctgtattagtccattttcaagctgctgataaagacatacacaggactgggtaatttacatagaaaaagaagtttgacgaacacagagttccacatggctggggaggcctcacaatcatggcggaaagctaaaggcatgtctcacatggtgacaggaaagagagaaatgagagccaagtggaagaggtttctccttataaaaccatcagatcttaggagacttattcactaccacaagaacagtatgggggaaaccactcccatgactgaattatctcccacaaagtccctcccacaacacatgggaattatgggggctacaattcaagatgagatttgggtggggataaagccaaaccctatcagtggcttaaacaatagaatttgattttctaataattctggaggagaaattcaaaatcaaggtgtcacagctttgttttttctgacgtctccctctttggcttgcacatggccaccttcactgtgtgtccttaactgctgtttctctgtctatatgcatccctggtatctctcttgaatgtcctaatctcctcttcttacaaggacatcagttttattgtattagggcctgctttgacagcctcatttataacttaattcattaatggccctgtctccaaatacagtgcttctgatgtactggtggctaaggctttaatatattaattttgaaataacccaaattcacactggtgtgttttaaaaatatatttactgggcatgatggcctataatcctagcactttgggaggctaaaatgggaggactgcttgagtccaggagtttgagatcaacctggacaacatagtaagactccatctctgcaaaaaataaaaattaaaagttagccaggaatgtgggcatagttctgcagtcctagatacttgggaggctgaggtgggaggatcacttgagcctgggaatttgaggttgcagtaagccgtgatcatgctattgcagtcagcctaggcaacagagtgagatcttgtctcaaaaaaaaaagatggataattatgtaactaaaattaaatgtattcactgtagctcaattacataatagaggaaagacatgaaaaaataatctgtaattccaacactttaaaatagatatagacaaatatgacatatttaatgacataaaataatgcattttgtggttatgtaaacagtgccctagagttaattttaggtaatgtacaatgttttactactatatacacatgtgtacatatatgtatctctttctacaatatgtctatatataattagtccatatttcatatcattcttcttctaacttgaaatgtatttataattggctaatcattttttcacagtgtaagaataattcatactgttagaataattaattgggagactattagactgacttggctctaggttttaacttaatcaaatcaagacccatttcagaatgaacagtcatagcccaggaaatcaaaacttaagtgtaacgaatcagaaactaccaactgccctttaactagggactttcccaatcagaaactgccaaataacttctaacaagggactttccactgtaatcaatcaaatatttcctttgaacaccttgttccatgaacaccttataaaagtttttccttcacattccctcatggaggcctggaccactgtactgcctaaatcatcaataaacatttgttcatttgtaaacactttaacattttaatgcacccattttgttttaacagtttttatatcagcattgtaggcatagctattttatcatattgaggtactacagctcttgaaagtagcaaagaagtaagaatgacacagttcatatcaaaaattaaagaagtatggatactttcgtggggatcaaaggaaactaaagaagcgcttaaaacaatcacaaatgtcgcagtgtaaaccatcatgaagaactaaataattgtttaatatagaaaccggccgggcgtggtggctcacgcctctaatcccagcactttgggaggctgaggcggacggatcacgaggtcaggagatcgagaccatcctggctagcacagtgaaaccccgtctctactaaaaatacaaaaaaaaaaaaaaaattagccgggtgaggtggtgggtgcctgtagtcccaactactcgggagtctgaggcaggagaatggcgtgaaccccagggggcggagcctgcagtgagccgagatcgcgccactgcactccagcctgggcgacagcgagactccgtcttaaaaaaaaaaaaaaaagaaaccaacatcatcagttccatcattgcatacagaaaggtgccattcatctggactttccttgctgtccttgcagcaacagctccgaattatactgccctataagcctgaattacctaatctctttttttctcctttctttttaattttaatttttatttttttgagacagagcctcactttgtgacccaggctggattgcagtggcctgatcttggaacacgcctataagcccagctatgcgggatccctcgaacctgggatcccgcatagctggggttacaggcatgtgccaccatgcctggctaatttttgtaattttagtagagacagggtttcgccatgttggccaggctggtcttgaactcctgacctcaagtgatctgcctgccttggcctctcatctttctcttctttctaataatgtctcttttccctggttttctttgcagtattttctaaacccttgctatgtgtcatgtatagcttcacactggtgtttctatcttcttttcataaagatttcagctttgacttgcactaccatttatctgactctatgtgggtctcaaattcagtcttcctttgagacgggatctgaagagatctgccatgcaatttccccatatagatagttttcaacctagtttgcctcaaaaccacaagacagctaaaaagtggctacagtggaatagttatcgcctttatttctttaaatatgctgtttctaagtttatgggtaaaatggcataaagtatgttgcccactatctgacatattaagaagtatttcaaacatataaacaatctgaaatttgaaattgacacaaatgatcaatttcccaagaaatctataattttttaattattttggcagcattgaactgttttcatttttgtagctttatctatcacgcaaattttcaatagattctgtaaaaaaatagaggaaagagctgataagggaaatgggaattcacattataatttatcagaatgcttcactacagataactcactccgttttacttttgtaatcccattgcttgagagtgaacttgatattaatattattattattgtcaatattcaaatgtttttgacctatcgaaaaatcaatatcacatagtcttatgattcaaattaatattacataatttttagtgcttaagggttattttcctctctagtttcagtggaaactataagaggttctatctttatttacatttttcaaagtctttcatgaaaggtcataagatgaataaaaattttaatctctcaattacaaagtaaaatatagcagtatcatatttgtaactatataattaaatacgatttattttccaataaaccataattatgttgatataaattctttgttcctttggaaaatgtgatttttcataactaatttcttgcaagtaggaaaagaacaagctaatatgcttttcttatttcgaataaataatgaatgtgaagaattatatttgattttgaattctagcatacatattgtcacttgagagtcagtatggaaaagtaacatttcccataagaatgtcctaatgtacctactaccaattgttaatgtcttgagaaaaagctatagggttatttttcctttctgaaccacctgaaaacataattgaataatcctcctgcatatatatatatatatatatatatacacacacacatatatatacatgaatctgtaagacacatacaatttccccaaatagtcacatttaaacatgtagctacccttccaatatttccagtaaacagcagagctacatggaagagagaacttatctaaatttgcattaatagtattatgagataggctgaataattaaccttcccaaatgttcatgtcctcatccccagaacctgtgactatgttacctgaagtagcaaaataaatgttgcatatgtggttaagataacaaccttgaaatgggaggattatcctggattatctgggtgggccaatgtaatgacaagggtccttgtaagggggaggccagagggttagagtcaaggacagaaacatgatgacagaagcaagtgtcagagtgatagaattcctggaaacattataagccaaggctggagaaacccaagaaatcagactatcccttagaaagtccagaagaaaggcagctgcctccttgattctagcccactgacactaacattggtatttctaatctccaaaactataaaaaattatgcattttaagtcactacgtttgttgtatgttcttacatcagctgtaggaaactaatataaatagcattttatttcttttattccttcaagcaccagaaacattatattctcctctaacacaagtacagatgcacccacacacaccacacacacatacacacacacacacacagagagagaaagagagagagagagacaagacatgaaattccaagtcattgcttatgcattcctgtcattcatgtttaatgcctattctttaactctgttaaatacttgctgtgttagtctgttctcacgctgctaatgaaaacacacctgagactgggtaatttataaaggaaaaatatttaattgattcacagttctacacggctggggaggcctcacaatcatggtggaaggtgaatgaggagcaaagtcatgtctgagaatgagcgccagcaggtgaaataccagagagttatgaaaccattagattttgtgagaactcactcactgtcacgagaacattacgggggaaaccaccaccatgattcaattatctttacttggccctgcccttgacatgtgtgggatattgcaattcgaggtgagatctgggtggggacacagccaaacccgtatcacttgcctcaagaacacagagtcaaattgcacttgatgaacacataaccaaatacagatctggactatattccctcacatacaatttattttacacattttcgactacatttctgaaagtacaaacttgtttttttttctttgatacaagtcataggtacaggcatattgccgagtcagagtaaaacaaggcattttactaaaatctagaatctaagatatataataacttagttataagcatgatttaaaagaattgcattttctggaaaacatggagagaaaacttgcaactaagtgctggctcaaagcttaaattggaaaggtaataatgtttttgtttctgtttttgtgtaataaggttctaactttataactgaggaaagaaacagtacatgttatatgtggtttattaacactttcttaattcaacgttttcttcaatttagattataccttcagtattagaaaataacaaatttatagtatttagacctaatttttttttgtctacaggactcctaaatacctcctaaattttaaaagatggatttgattggttgctttacacagttaaatgtgaagcaagagagcctttcctcccacttacctcacctcattctctttgctctgtattctatttcactttactttatgttatttatatttccaacttgcttattatatgtttctcatattggaaaataatttcctaatggcaagactgggggcttgggggttttaatggtgtatttccaacacctatgataggagtatcgtccttgcagtaaacagttaatgaatatttgccacaagaatgaaacagaaatgtacagaaaatttcactgatgtgataattaaaataaatttgtttttattttccctgaagaagttgattggccacacatactcttttatctaaccataatatattaaatatacaacataaacttggtgggattcttatctgtttgtcgtgatttatcagtaaatttaaaatctttttgctcaaccattccactgatatttggaatttctgcctttgcccccaatttagttcataaatattaattatatcattttctgtgtgtgacaccagggagctttcctagacttcttaatcattttaatgctcctcagtattaggtgataaagggcctaaaatatgctcttctggtatattgactatttaagttaaggattcttgaaaaacagcctgtgcaagaagatcactttgacctttatactctttaagaaaagcagaagggaaattccccgaagcccaaatccatgctgcatgctgctttatcagtggagccagctagagtcattcataaatttactcccacaccactatgagattctcaacaaaaaaatatatatatatatatagttttgctttctcttatgtttcagtggtatcaaatccacagtttcaagaggctggacaacaggcaataaaggaaagtgatccctcagagataggaaataaatgatgtgagccttatcattgcccaggttactcctttaggaatgtttcttggccatggcataggaagaggaacccaggttgtgcccgatggtgtccatgagttgaggagatggagctgggaatttagggggctaaagcagtaacaaatatttgagagaaaagagttctataataagataaatggaaaatccgcagaagtcctaccctgatgccttgagaattcagcagaatacaaattagctcatatatatgagaaaattgccttaggtcatggaacaaactagcctaaatgattagaggaaaaggtagttcaacattcaaagagggcctagaaaagtttctgttctcatcattgcattagtcagcattctccaaaaaaataaaactgacaggatacatacatacatacatacatacatacatatatatatatatatatatatatatataaaggatacaaacatatattcataatacgacatctgcaatctggagacccaagaaaactggtagtgtaattctagtctgagtcaccaggcctgagaaccagagaaggggccaatggtgtaaattccagtccaagagcagaaggagatggtatgacaaatctcagctcaagcaggcagacaggaagcaaaagggtgaattcctccttcctccatgttttgctctgctcaggccctcagtggattacatgatgcatacttataataggaagggcaatgtattttattgagtctattgactcaaatgctaatctcatctgaaaacaacatcaaagacatgccaagaaataatgcttaacctgggcacctttggcccagtgaatttgacacagaattaaccatcacaactatcaagatgggaaagcctctttatctgtgggatattgaaaagattacatggaaaggtctttcctcaatagtgggaaatattcagctctagaataaacactgctccggtcccacctactaataaaccttagaagtaagacttgaagcgatcaaacttttccatgtaacttaattaggtcctgaacaaagatcacgaataattgtgggaataaaatttaatctgcaggtaactaggtaaaatttacaaggtcaaaatttacaagtttctattcaaaagttaaaaagcatgcaatgaagcaggaaaatgcaatcaatctagaactaacataggtgttaaaattagtgtaaagtaaataaaagttattttaacaatattccgtagtttcagagttaagcagagacatggacggtttaaagaaaattcatttataacttctagagataaaaactacaatgcaagcaatgagaaatatactgaaataatttaaagctgcaaatgaataattaattgcaaatgaaaggtttagtgaacttgaagatataacaatataaaaatatacaaaatgaaacataggaaaagaaggaaaaaatttggtgcatattgggacagcctcaaactttctcatgtatctgtagtattagtttccaaagaagaatgaaaaggtagaggaaaaaaacagaaaaataaaaaaataaataaataatgactgaaaatattccaaatatgttaaaatgtataaaaccacaaactcatgatgagaaataaaatccaagcatgagaatcataaaaaagtaaataaaaactactctaaggcacattatcaatttactcaaaactaatgataacatgcaaatcatgaaaacacctaaagacaaaaaagttaggtacacagaaatacatacaagaatgacagtataatttttggtaaaaattgacaaccttattctaaagtctatatgaaaatgcaaggtacctcaaagaaacaaagcaactttaaaaaaataacatatttgggagataaacactattggattttaagtaatcaatataattttgatttagttataaatataggaaaatagattgatggaacagaataaagagcctagaaataagcccacacgtatgtggacgatttgtttttcaacaagtgtggaaaggcaaatcagtgaataaataatagccttttcaacgaattgtgctggaacaattgaacaaccacaaagcccaaaaggtaaacttcatacctcataccatatccaaaaataaactctaaagaatcctatgcctgaagtcaaaagtctagaactatgaagcttctgaaaaaaaataggagaaaatctttgtgaccttgcgttaagcaaaaattaattagctataacactaaagcactatccacaaaccaaaaaaatgagttggcattcataaaaaataaaagttcctactttttgaaagatacttttaagagactgaatacagaacaaataatagtggcaaattacaaattaattacatttaattagagctaattgaaaacttgtatcagaatatataaaaatcggtcaaactcactaagaaagcaaacggcctagtttttaatttaaaaactgggcaaaatatttgaacagacacttcaccaagaatataagacataagaacatagaaaatgctcaccatcaccagttaatattgctcaacattttaacgacctgcaaattaaaaccatagtgcacacttattagaataattaaaattaaaaagattgaccataccaaatattggtgattatgtagaggaaatgaaactctcaaacactgttggtggaaatattaaaaagatacaattagtttggaaaacactttagcaatttttttttttctttgagatggagtctcgctctgttgcccaggctggagtgcagtggcgcgatctcggctcactgcaagctccgcctctcgggttcacacaattctcctgcctcagcctctggagtagctgggaccacaggcgcccgccaccacacccagctaatttttttttttttttttttttgtatttttagtagagatggggtttcaccgtgttagacaggatggtctcaatctcctgacctcatgatctgcccgcctcggcttcccaaagtgctgggattacaggcgtgagccaccgcacccagccacacttgagcaattttttaaaatattaatcgaatatataattcatatgaaaacaaataattcagccattcaatttctaagtgttcaatctgttcataagacttctacaaaaatggtaacaaaaactttgtttgtaataaataatcgaatgtccctgaataggtagcaggtgtgtggatgaactctattgtgtatctataatgcagtcctccacagcaatacaaagaaattaattattgatacacaaaccacatgaatgcatctgaaaataattacattgagtggaagaagtgagaaaaaagtggttcataaattgccattacatttacaaaattttctagaaagttcaaactaatttttagtgttagaaagcagatcagtggctgcctgggaatggcacactagcgagaaggaagaataaggaacacaaacaaatgttttgaggtgcttgacagatgcactatgttggttgtacttgtgatttcaaaactgtacatgtatataaatttttcaaattgtacacttttaatatgtgcaatatcaattataccacaataaagctatttttaaaaagctgaaggtaagggttgaataatttccccaactttctcaccaatcttaaataaaagcaggtcacagagcaaatttgccacaggtggcaatattatcaagtaggtgcaaaaagagtcacatactctttctttgttgttttgtaagcttaatttagttccaacgttctatctttttatgtcttccaaccacactttacagagagactttatttaaaaacaattaaaaaaacagtattatttaggcagaattcagctactcttatggtcatcaacagacaacaaactcatctgaattcacgcttgcacaatgaaatacacagagatcatgccgtgagctacagccaaagggttttctagattattttcttccttatgccacataaaagagtatctttaaaataatttatccaaatcttatcttaacactgataccagtaaataagagcccgactcttaattcattatgctagcaagccaatattttcagccatggcaactaattattaaatgccataatgatgagcaaaatatctaatattaaagatagaggaaattggagtacttgcagtagccactagtggagtacagccaccttgatttgaatgtgtctggcatagccctggagtataaattgctgagcatggtaacttgctacacacagagtaaaacaaactacattcacaagcgtatcatgctgtctaaacacaggtgtattcagataaataaaaaacatcttagcaaagggtttatgttccattagataacacatacaatgaatgaactagcttctagaggatcaccttactactaatctttcgtttaccgaatacatattttatatcaaccatatggctccattccaccagcagctaaaggctgagtcaaatttagttgtagattagataaataaaatgaaaattatactctataatgtttcctaaactttaatacgataaaaatcacctgggacatttgatagtacatttctcagcacttttctacacaaattatttttcagtcagtttgaagaaagttctggagaattgatgattttatcatttttaagctaatttttattctcaggggagtttggcaagcgctgcagatgtgttttatagcacaaattcctcatcaataagaatactgtaataatctttttttgagactgaaactctccgtattttaatttattgtctatttcctctatttcttacatctacagaaaataaagacataacaaagaaattactttaactctgtatgtcatgtacctgatttttatgccgcactctgcaatgactctcaaagttataatttactttaactacaggtctcattacaacagtcctcaataaatttttcaagaaaatccttcaaagaaaatatgaagaattgactgtcttagcctccattctgcctttcctctagcctggaaatttagaaagataataactacctttcctgggttccctccctggtaaagttttgcacggaaattagatacgttttgtgcgatattgtattagtctgttttcacactgctataaagaactgagactgcataatttatgaagaaaagaggtttaatttactccacaggcttagctggaagcacgactgggaggccccaggaaacttacaatgaaggcgaaaggcaaaggggaagcaaggcatgtcttacatggtggcaggagagacggggttggcaggaactgagacacaattttaaaccatcagatccagtaagaactcacttactatcacaaaaatagcatgggggaaaccgtcccatgatccaatcacctctcaccaggtccctcccttggcatgtgaggattacaatttgagatgagatttgggtggggacacagagccaaaccatatcagatatctaagatagaagttaaatgaaagccacctgtctgctattttttactgctatcaagtgaaatatggaatgtgaatatttgtgtaaaattgagatggccagatttagtagtccagattcatgagtgtcaagtggcaggggtggtagtaatgactcaaacaagcagctgtctcatctaggcatctgagcattcatgacttagtagattaaattatttgccaattctcatacaggaggtaaggtttgtaactcctccacttgaatctgggatggcttgccatttcttcaactaatgcagcaaaagtgattttaaaagtgttctgagggtaccctttaagagaactgagaatttctgttacattcttcttggcgccttaagtcacaatataaagcctactctcagccacactgagagcctgtgtggagagatggaaacagatgtctggactttgttcagtgttccaaaactaccttccgagtcagaccagcagaagcctcagatatcttggaggagagatgagtcatacttaccgttgccctttctaaattcctgtctcatgggattgcaaactataataataatataatgttgtacagctataaagatttggggtgatttgttacacagtagttgtgcagaacagaatttagtcctgaaattgatgtgatatcttgataaaaatcttaatatggagcactggctttggaactgggtagctggcacaaacagacaagtcttgaagaaattgttactcaaagcttgcaaatacctttaggagacagagtgagaacttgaaagacaccaaagaatatgttcttggagactagtgaaaaggaaccttgcttttatattgtagaaagtttggaaaaactgttgcttcttgttataaggaaaatggtacgcctaatgaactcatggatttgcatgggtttatttctaagcagaatgtagaaagtgccaattgtcctcttaaagcattttatgataaattacaagatacttaaagtgaattacaaaagaatctgtttacttttcaaggagaatttgatggaaatatttctaactcaagacttcttgagatcaaaactaaaactgtatcttattctttattctctctgcatagcaaaggactaacaaagtgaaaatgaacaggagtcctcagtgcaagtataaattttatgtcacttcaagacttcagtgtaaaaatctcaagggtgtaagagtaagtcaatctgttgagaacttagaaagatttaagataatatctcatagaagctgtcagctagaaaaaaagtattctaagggctttgagggcatcatttatgaaccacaactgtagggtataaaaataaagctagatcttcttctctcatgtctttcttagcagaacattctcaaaatttaaaaaaaaaaactctcaagaaaaatattacatacaaaatattttcaattaatcagattaaagataaagccaaggaagtgatcacaaattcttaatcagggctttgcagacaatttcagagacaatagcatttctaaatacctttagaatgtatctcacaggaacatatatttaaccatacgacttctaagctgttgggaacaggcccccataaactggccccaaaactgcccataaacaaaatctctgcagcactgtgacatgcttgtgatggccatgacgcccactctggaaggttttcagtttactaggatgagggcaaggaacacccggcccacccagggcagaaaaccgcttaaaggtgttcctgaaccacaaaccatagcatgagcgatctttgccttaaggacatgttcctgctgcagataacgagccagacctgtccctttatttcggcccatccttttgtttcctgtaaggaatacttttagttaatccataatctgtagaaacaatgcttatcactggcttgttgtcaataattacgtgggtaaatctctgttcaaggctctcatctctgaaggctgtgagacccctgctttcccactctacactctatatttctgtgtgtgtgtgtgtctttaacacctctagtgccactgggttagggtctccacaaccgagctggtctcagcactaaagcacttaaggctattgtcctacagcaacctaacagagagctcaaagtagagaagtaactgtcttaaagatatttgtagatgtggcactttctaataaagtatacccggtaaatttatcaagaaatctccaatgattttaagacaattttataggtatagtcttctctagtttaaaataagaaatagagatagcataatataaaaaaaggaatttgaatttctaaaatccaatgggcaagaagcaagcagagaaggctattcagctgcaagcatggtccatttcttatgaaaaaggaaaaatgacccagaaggcaaaaaatgagcacagattgcaaaacaggaaagaacagataattattcccaaggaggagaattggcactgatcaactaactgatgacatgtgtctgactggatttcagaacttctttggaccagtgaccgtcaggtatacccagtttcccacaatgctaggtgggagtgtctactgaagttattctgtgctttctcacataatatattggaaatgtgtgaaagagaggggcaaaaacctcctccagttagtaatctacagattgagaggacctgtaattgaggagtggcacccaaggcagttgatctgcacttagacaatgatttagacaatgacatccaggagcttgagcctgggtcaagggctgtaatgagatggaacatttgtattttaaaaaaatgtaaataatttattgccagatggtggattttggtggattgatgattgctgcaatgtatttgaatctcgtccctcttggaagctaaggtttatgcagcaacccttttaatataaactaacctgtgacagctttggccaatagggtatgatcaagtgatgctatgacccttccagacatacttttaagagaactgacagttgcccatgtctccttcttgaatcctcaagctgacatgaaagacatctgactatcctgagagagtatagtgagagagagcttaatctagcacacacacacagagagagagagagagagagagagagagagagagagagagagagagagatcaatccagtcagcctccagaatttcaagctttgtttgaatcatcctagctgaggcaccagacacttgaaattgaaacaagccatccaactgtgccagttctgaatatttgatccacagaatactgacatgaaataatgtcaaattgtttttagctaagttttctgactgtttactacacgtcaatagattaaccttaaggcttaccttgaaaatcttaggatgaccctacattgatcatcctaatttatataacttttcatataaaaaatcctaatctatgtaacttttcaaatagtctctcatgaaaatttaattgttctaagtaacagtggcttcaatgtcatttctgtaatgaatgctacttatgtattggttgagaatcactggaaaatttatgtcatgggctgaattgtgttctccccaaaatccatatggtaaagctctaaccatcagtacctcagaatttgtattcaaaaacagggaatttcaagatgttattaaggtaaaatgaggtccctaatccaataagaccatccttgaggaagagcagattaaggtacagacacacactgaggaaagactatgtgaagaaaaagggaaaagagggccatctgcatgccgaggaacgtgtcctcaaaagacttctagcctccagaactgtgacaaaaggaatgcacattatttgaaccacattatctgtaatattatttatggtagccctagtcaattaatatagcctatttcttcagaagctagatgatttctgaagtcttctcagttggcataaacttttgtataacatcttgcattgtttactgtcttgaagcaaatcaagtacagctgaagacatagttcccatcattggcaataagtccaagatctgttaattatttggacttcaacctcttccctggatgtctgtgtgtttatgtcaatctatcaatctatgtatatttagatatctatgtatctgtctatatagatatctagatatatatcatgtgtgtgtctgtgtgtgtgtgtgtgtgtgtaagtgtgcttgagccaggacatcaggaaccaggagatgaggaagaagaggaactccctatttctcagtttgtttttatagtgtctgcttattttctttcttttcctagtcactttaaaggcagaaaagtcaactacctcttttctaagttaggatacatgaatagatatttatatgttaaagcttacaatctccaaaacaccagaggccaatcctcatgggcactgataaagctattcctatgacagatctggagtggagtccattatttgtgaccattaacctgtcctcatccaagacatggaatggaacctgggggtatggtgaatttagaagtgatggtcttgtgcacaggggaacaggaatgagttaggagattccctattagcttcttctctcaacacaccaagctctgatgacttctgataaaatttaggttatgttcttctcttgatttgaccatgacaaataaagataccttgcgtacttgcttactttcaggctcttcagaatatctgtgtttttccactttaaaaaatagatgatcggctcggtgtggtggctcacgcctgtaatcccaggactttgggaggccaaggcaggtggatcacctgaggtcaggagttcaagaacagcctgacaaacatggtgaaaccctgtctctactaaaaatacaaaaaaaaaaaaaaaaaaaaaggcaggtgtggtggcacgtgcctgtaataccagctacttgggaggctgaggcaggagagtcgcttgaacccaggaggcagaggtttcagtgcgccaagatcctgccattgcactccagcctgggcaacaagagtgaaattctgtctcaaaaaaaaattataataatcataactctgtccttgacaggtaactaaaagagttttttttactgccaaactggtctggttatcatattcatgaagtgatgatggagtgaataaaggatgaaaattcacctttgactattctgaggcatatataaaagtcaaaaaatacttgataatttttcattaggattcccattgtaaaaatcaagaatagattaatagctctatagattatataattacctagaaattgcattaatctggtacatttattttctcattctaaaaccatacatcttaccacttaatatcccctctccattcttttttcccctgctaaaaatctaatgagatcaaatcatacttgagggagacactgctaattctattctctaaaggtgaaacagacatgaaattgcattttagcaattttagtatgttcttatgtatggtcagggaaatcgacttgaatgatttctgaatataaacagtttaaattacaatcaaattttcatttaacaagcaggtaaattaatgacacacataaacctcatttaagatataatttatttcctctggtttattaaattttgatgagtgttatataactatatcattatatataaataattacaaaagtatataattaagagaaatttctcttattttaatatgcactctatttaatggagctaaaacaatagctaaatagtaagcaagagaaaggaaaagaaaaatggagttccaaatctctgaaactgtatagataattggcatgtgtaaaatttggactgacagtcataaacttttatcctccaacctaattatctattttatctccttaatatgtcagcttaaagcaaaacttattatcaatatcaaaattacacaataagttatatgttttatgatttgtgtattgtcataactgatttcagtgattcaaataacaattctagcttgtatttgttgaaaaatctaagaagagttgatatgaaaatattttaaatatgtctcactttgtataagtcaactcaactttgatcactgagatggttatctcatctgatggatacgcccacttaattcatgaactgctattgcctaaaaaaatctgaacatcttttacatctgttttttttttctacaggatattttatcctaaaaatgaattatatgtgttgaaaagtataaactgacatatttagcaaattaacagaggacctattatgaaaataatgagagcaagaacacagcaggtacaatagtggtaagatatgagattctacgaaatggtaatcaggcccatgagacaaaagcgaattctaataggaaagaacattaatattagtggattttctagaatcaactaaggcatgtgaaatgtcatgacatatgaacaaaacaaatacataggcttcttgattaatataactcaataaaaaggaaagtggatatagcatatgattatattattattatcatcattatttaactattattttagtttcacttacatttccttaagttttcaaatgaaaaaaacaaaaatgtgtttggggaaaaaagaggtattttattagactccaactgagtaatgacgtgaaaatgccagctacagatgctgattcatcataatagcatgttctcccaaataactatcttatctgcctctgcaatgtcattagacctccagatagcagccaagaaaacaagattctttaaaaaagaaatgacaacaaacctatagtcaattatttctaaaaacatccatatgttatacacaaacatacatatacacacatatttatacacacacatatgtaaatatatatatataatatttaatacacacactatatatgtgatatgtttaaatatataatatatccatggcttacaatgattactgtatgtatatatatatgtgtgtgtgtatatacatacacacatactgaaatatactatatattatactatatatattataaatgagatataccatatatatttctctctatatataagtatattagttcatcctcatgctgctacaaagaattgtccaagattgggtaatttataaaggaaagaagtttaactgactcacagttctgcatggctggggaggtctcaggaaacttacaaccatagcagaaggggaagcaaacacatccttcttcacatgatggcaggaaggcaaagtgcccagcaaaaggggcaaagccacttataaaaccatcagacctcatgagaactcaatcactatcatgagaacagcagcataggggcaaccaccccatgattcaattatctctcaggccctgctcacaacacatggggattatggaaactacaattcaagctgacatttgggtgaagatacagccacatcgtatcattcctcctctggcccctcccaaatttcacattctcacatttcaaaacacaatcttccctttccaaagatcccccaaagtctgagctcattccagcatcagcccaaaattccaagatttcatctaagacaaggcaggtatctttcacctacgagcctgtaaaatcaaaagcaagttagttacttcagagatacaatgtgggtacaggcactgggtaaatacaccagttccaaatgggagaaattggccaaaacaaaggggctacaggccccaggcaagtccaaaatccgatagggcaatcattaaaacttcaagttccaaaatgatcccctttgactccatgtctcacacccatggcacactgatgcaaaaggtgggctcccatggccttgggcaggtctgatcctgtagcctggtagggtaaagcctcgcttcctggctgctttcataggctggcgttcagcatttgtaagctgttggtagatccaccattctggggggtcttgaggatgatggccttcttctcacatatccactaggcagtgccccagtggggactctgtttgggggctccaacccacatttcccttctgaactggcctagcagaggttccccatgagggatttgcccctgaagtaaacttctgcctggacatccaggcatttccatacatcctctgaaaatataggcagaggtttccaaacctcaattcttgtcttctgttcacccacaggcccaacaccatgtggaagctgccaaggcttgggacttgcaccctctgaagcaatagcctgagttgtacattggaccattttagctgcagctggatcagctgtggtgcagggcaccaagtcccaaggctgtatacagcagagtgaccctaaacctggcccagcaaaccatgtttccctcctggacttgcgggcctatgttgagagaggctgttgtgaaggtctgtgacatgccctggagacattttccccattgttttgatgactaacatttgggtcctcactacttatgcaaatttctgcagccggcttgaatttctccccagaaaattgggttttctttttttatcacataatcaggctgcaaactttccaaacttttatgctttgcttcctcttgaatgcgtctcacttagaaatttatttcgccaaatatcctaaatcatctctctcaagttcaaagatctactgatatccagcgtgggcaaaatgcttccagtctctttgcacatagcaaaagtaacttttactccagttccccaaaagttcctcatctccttctgagaccatatcagcctggacaccatggtccatatcattttgatcaaactattcaacaagtctctgtgaagttgcaaactttcccacattttcctgacttctgagccctccaaaatgttccaacctctgcctgttacccagttccaaagttagttccacatttttgagtgtcttcacagcagtgccccactctctgtggtaccaatttactgtattagtttgttctcaagctgctatagaaaactgctcgagtccaggcacagtggctcatgcctataatcccagcattttgggaggccaaggcagatcacttgaggtcaggaatttggaaccagcctggccgacgtagcaaaaccctgtctctgctaaacacacaaaaattagcctggtgtggtcatgcagatgtgtaatcccagctgctcaggaggctaaggcaagagaatcacttgaatttgggagacagaggttgcaatgagccgagattgcaccactgcactacagcctggggtgacagggcaagactccgtctcaaaaaaaaaaaaaaaaaaaaaaaaaaaagaactgcccgagactgagactggatatattagtccattttctgttgataaagaaatatctgagatggggcaatttaaaaaagaaagaggtttaatagactcacagttccacatgggtggggaagcctcacaatcatggtggaaggtgaaaggcaagtctcacgtggtggcagacaagagaagagagattgtgcaaagaaactctccttttttaaaaccatcagatctcatgagacttattcactatcatgagaaaagcagagaaagacctgcccccataattcaattacctcctaatgggttcctcccacaatatgtgggaattcaagatgagattttgttggggaaacagccaaaccaaatgatctgcccctggccactccaaaatctcatgtcctcacatttcaaaatgaattatgccttcccaacagtcccccaaagtctaactcatttcagcattaacagaaaagtccacagtccaaagtctcatctgagacaagtcaagtcccttgcagctatcagcttgtaaaatcaaaagcaagttagctacttcctagatataatgagagtagaggcattgggtaagtactgccatttgaaagggtagaaattggccaaaacaaaggggttataggcctcatgcaggttcgaaatccagaggggcagtcacatattaaaactccaaaatgatctcctttgactccatgtctcacatccaggtcacgctgatgcaagaggtgggttcccatgttctggcacaactccacccctgtgactttgtagggtacagccttcctctcagctgccttcacaggctggcactgagcatctgtagcttttacaggcacaggttggaagctgtcagtggacctgccattctggggtctggaggacagtggacctcttcttacagctccagtaggtggtgccccagtagggactctgtgtgggggctctgaccctacatttcccttctgcactgccctggcagaggttctccatgagggccccacccctgcagcaaacttacacctgggtatccagacgtttccatacaacttctgaaatctaggcggaggttcccaaatgccaattcttgacctctctgcactggcagactcaacaccacatggaagctaccaaggtttggggcttgcactctctgaaaccatgagccaagctctacactgatccctttcagccatgactggagtagctgggacacagggcacaaagtacctagactgcacacagcacaaagaccctgggcctgtcccagaaaaccactttttcctcataggcctcctggcctgtgatgagaggggctgccatgaagacttgtgagatgccctggagacattttccccatcgtcttggggatttacattctgctcctcattgcttatgcaaatgtctgcaactggtttgaatttctcctcagaaaatgggatattcttttctattgcaatgtcaggctgcaaattttcagaactttatgctctgctttccttataaaactgaatgcctttaacagcacccaagtcacctgttgaatagtttgctgcttagaaatgtcttccaccagataccctaagctatctctctcaagttcaagttccacaaatctctaggacaaaggcaaaatgccaccagtctctttgctaaaacataacaagaatcacctttgctccaattcccaacaagttccccctctccgtctaagaccacctcagcctggatttcattgtccatatcattatcagaattttggtcaaagccattcaacgacttaagtctctagggagttccaaactttcccacattttcctgtcttcttctgagccctcaaactgttccaacctctgcctattacccagttccaaagtcacatccacttttttgggtatctttatagagtgccccactcccagtaccaacttactgtattagtccattttcacactgctgataaagacatacctgagactgggcaattaaagaaaaaaaaaagaagtttaattgacttacagttccgcatagctagggaggcctcacaatcttggcagaaggtaaaacacacgtctaacatggaggcagacaagagaagagagctactgcagagaagctccccttttttaaaaaccagcagatctcatgagacttattcactatcacgagaacagcagggaaagaccttccccatgattcaactacctcccactggtccctcccaaaacacgtgggaattcaagatgagattttggtggggacacagccaaaccataacactgtgtaatttagaaaggaaagaggtttaattgacttatagtcctgtatggctggggaggcttcagaaaacttataatcatggcagaaggggaagcaaacacgtccttcttcatataatggcaggaatgagatgtgccaattaaaagaggaaaagaagtttataaaaccatcagatttcatgagaactcactcactatcatgaaaacagcatggaggtaactgcccctatgattcaattatctcccaccaggtccctcccacaacatatgggggttatgggaactacaattcacaatgagagttgggtggggacacagccaaagcatatcaataagtatatataacatatatatgtattttttgtttgtttgtttgaatcactagttatatgttcaatgcaaacattttaaaagaagagctgcacactggaaaaaaaaaatacccctgaaaatatttaatgtaaataagtccttgagatggtgctttttacaaaagtttatcagcaaatgccctttttttgtaggggacagggcagcaggagaatagggacaggatatcagacaactgatttttactgcaataagagcaacaaggaatctcaccgtcacatgccatctactttatgtaaaaaccaatccagcagaacgagcaacagtcaccctcaggaggtgatttagccccaagtacccagagaacagcctcaggccacgacttctgtgctgcttcactgtgcccagaaccatctgccaagaccaggaattcatctttggagtataacttgttttctctctttttttcacgtctcaaaaaataaaaaaagcttcataatacagccgaagggttaccatgtgtctaaaaggaggacaggttcccataaacaatgttgtcagcttgagtgggggtaaacacaggaaggaacaccataaattaaagcagaccctgactcttcagaggctctgcggtgatgtctgggggccagatctgccagtggctgcatttccagcactagcatagtgttgaggactatgaggaaatatatatatatttctagtagtcattctaaaccatgacagatttgattgtcataatgataagatgatgacagttggtacctgctaatggtatttaatacctgggatctcaagatagctaagcatcctgcaacagtaccacagtctcacaaaacacctgtagccccctggtaattaaaaaaaaaaagtgaggcataagtttttttctttgattactttaaatagatctgatcaaatagggagtctgatactgaaaatgacccctgcccccttattcccttgttacattcaaatttgtgatgaatttctttaccaaaggctaggaagtaaagagtgagtgataaatcagatattagttgatattgaggataagaagcaaaggttattctgctatcatttgcaatattgcctggcattctggtgatggaaaccagggaaacagcaaagatccaatggctaaaggatcatatcaagaaaagaagaccagtgcggtgttagtgccttgttcttttcgtcattttaagacagcatcactgttactatttaattgaaaacttggaaatgttacaaatcttaaaagtgttatgaagtataacatctatgcagagtgaaaatgttgctgatcagtctcagaagttttatctgtgtgatttttaaaaatcacgtttttctggcctggcatggtggctcacacctgtaatcccagcactttgggaggccgaggcaggcagatcacgaggttaggagatcgagaccatcctgcctaacacggtgaaactccatctctactaaaaatacaaaaaattagccgggcatggtggtgggcacctgtagtcccagctactcgggaggctgaggcaggagaatggcttgaatccgggaggcagaggttgcagtgagccgagatcgggccactgcactccagcctgggcgacagagtgagactccatctcaaaaaataaataaattaattaattaaaattaaaattaaaataaataaatcatgtttttctgactgtctactcccttgttgctactttacttattctggtccacccagcagaactgctttcaaaggttgttgagaactgaatgaaggcaaatataagtggtgcatgctgtgtaaatctcctctacacctcacctttatagaatagaggtgttaactgacatgtacctgtgtgatgttttgcttattcctattacaaaacagaaacatatatttatagaaaaatgagagattaacatctttaaaaactgtaaaaccagtcatacccatacagaaagctcttttgtctttaggctattgactcggtacacatgttggcatatgacccagtgaatttgaatctccactcttccaaatacccagttgagctttgcttagccatctacccaagataagttgctctgagatcacatataactccttaacacttagcaataagaaatttctactaattgtattgatttctgtatatagaaagcctactatttctatagtcattcaaatatttttactccattctgcaaaaccaaacagttataactttattcaaatcatgtgaacaagattgaattgggtcatttaggagctaactatcaacatcagcacttgttaaagactaactttagttctgaagtagaggaaaatttaacaagcacttctgttttttcatgctaagcttagggctagatacactacttaagaacaacattcaaattgctttatattattggttaattaaaacttaaaaaatttagcattttaccaacttgacatagccatgacttccattataagttaggtgaaagtttttgtaggctagcaaattataagttatttaatatataaaagaaagtcacatactacatttgattatttgttgtgctcccacctgcatttctttcttgttacttattactatgtaatcacagcactttaataaatattttctttatctactatacgatttgaaactgaaaaatggaatttcatataagaagaataaatgtatgatttaaaagctgcaaaagggtattttacaagcaattctaagttcttaatggtatttatgtggagaattagaaacaaaagtgaaggtagaaaattcggatatattaaactgaaactattttcttaattataattgttttgtcccctgatgtagtcttacatttcgaattatataaaattttataatttttattcaccaaaatattcctaaaaaattaagatacgagtaaattcttatataggaaatatgattcatgggtttgttgctataagtaatttaaattctgcaaatccttgtgcatttctctttcacctaattccacatggaaaaaaaaattcttcagacttaaaatagaaaatttggaagaccatcaagattatgtttgtaaactgctgacttgttagcttttttaccctcttggcatatgtccaaatacagccttataattaagcaggtctgccatcttaggtgccaccaaaggtgccccttattgatggcagtcagatggaataccatctggtagtagcaatttattatttgagatatttaatgacatgccacatttcatacacagttaaatgtatcattctttagacactgcatttttattgggatggttacttaaacagttaagtgttgacatttttacagtcccagaagattataggtatcaaaaaagacaaaaatgacaagacccacagggattttaattaactttgtaaacctccattttcataaaaactatgtattacatgtttggtaacaattacaggtaacttgtatgcaataaacgttgtcaaaaggtatagggtagatttttttcctgaaaatggtctaaaactgtcatcaaaccctgtgctgaataaagaacaggaatgttgttgcccctttggcaaaaggatagtagctttggaacctgaaaactttggttcagattttctctctttcacttagcatgtacatgtttttgtccaacgaatttcattctaatgtgtaaaatggacacactaattggataagttataaaaacgtataaggcctggcatggtggctcatgcctgtaatcctagcactttgggaggccaaagtaggaggataacttgagtccaagagtttgagaacagcctggacaacatggtaaaaccttgtctctaaaaaaaatacaaaaactagcctggcgaggtggcacactcctgcagtcccagttacttgggaggctgaggtggaaggatcacctgagctcaggaagatcaaggccttagtgagccaagatcgtctcactgccctccagtctgggaaacagagtgagactctgcctcaaaataaacacattaaattaaaagttatatattgaattttatacgtaaatctataagagagaaatatacattttatatttgtatatttacattttattattattatgcttacaatgtgaactacttgaataacaggagtaaacgttttctaaattctctagcacctagcatatttcctattatctagttggtaattagtaaatgcttattcaatttaaatagtgttaatcttcttaaacttgggggtactgaaaattagattacagattttgaaaaattttccctaggtgtagatatatagcataagtaaaacacatttactatatttgaataatttgtatagtcttcttcgaaaaagtaaaattaagtagaattttaatagacatatttgtaagcatcattattgtttgcaataccttcccctttccccttagcaagaacatctcggttgtcagacagtaagcacatagtgcttttttaaaggggatgttaagtcttaggataaatataaagcatgttctacaagcattcattaattagatattaagtacttgaaaatgtttatatataagttggttactttacagattatatataaatttttaaattttcgattagagtacagggtactgcttattatttgtacttacagctggccatattcctataatcctcaatgtctgttgggacagtcactctaccactccttttggtattgaagctattttgaagaaaaaagtttgaaaactattctgatatttttattacttcctccaaattaagttccctcatgttattatcctatttagttttactatgaatttaaattattttggagtattctcatgccttattcacatctacaatttctaggttttgcttttgttgttttcatacatctttttccaaaatcttcttgatgttattgaaccattctacattttaatccatttgttagcatgttaataaacagtattgctgtcaaatggtcttcatactgcacagaggttgtttctaaacatccacgcttcctaactttaaatttgactgtaaatatttcgtactagttcacattcagaagatatttaaacatttacttatagaaacaatggcaagagatttgtttaaaaaaatctttatatgttgctttgaaagtcttatttgtgtttaagtgtgtttgtgtgtgtgtgtgtgtgtgttgtgtatgtgtttctgcaaagctgttgtaagctcatttcattccattgtttttttaccattctgggttaatcgttcttagtatttgccggattcccttattgacaaactcatatgttgtacttatatatactctagattcaaaaaagtgaatttatttgatttacttgaaaagatttattataaaaacatataatacgttaaatgacatttgcttttccagaataacaggctttctaaacaatcaggttttgtggttaccattaactgggctcacttttatcatctaatttaatctaattttgccatcattcctgtctacaatggtagcaaatataaggatttattctaagttatttattcaacttaatatgacaacgctttattttaacctgaagtaactttagagtatatccattctaaagaaggacattttctttatctctaatccttgctccttttctctccaagttctccacatataattcaggctataaaatcatgaaaatatatgcaagtcatgtataaaaatactttatctaattaaaagattgctttgaattaaatagtaattatactcccgttttacctatttgtatttagcagtaattttgctggtagagagagaattcttttgcctcccgttttacaaacttataatgacattttagatcatggagttaagaacaattagcacaaatgcaaattcatgatacattatacccactgaatattcagatattaaaagacatttatatttaaaaaatactactattaaacttctggatatatgagttttatgaacttgtcatatccctgcaagctttcccttatgacacagttaagtttggtaaagaaaaaaatagaaagttcaatagaaggtctttaatttataatttcttactacttaaatatataaatgggttgcaaggggaagatgaagataattcagaaataataaatgcacaaagtaaccatcagcattaggcctaataaaataatctcgggttcccagaataaaaatgcttacaggaggtacttcatgtcactgaggctcagacttctgagcaaaggattcaatcttcctgcagcccataccactaaatacacataaaggaggctggtttacagaatgtcaaatgatgctggaggctagaaccaacagtcacagctggggtaatgtgccaatgctgggtaaagtgcttctgagacggaaaagtgctactgatggggtcacaagaatgccaagaaaacagagaagtctgtcttccccgttctaccttcagttttctccctagtgccctattgatagaatttaatccatgagaagttggcataggaatcagagaaatgtactttgtagagtccatttgccagcataacagaccgatatacagaagggtaaatttggaaccataagcctagcacattgctggttctgctttatcggaaagaagtgacaaactacacacaaaaaaagagaatggcaaaatgattctagttcatctatattgtaggggaggaacaacaacaacaaaaaatctctctcctccaccctcccaggttctgcaggtgaggcactggaaagtaaactgacaaaaaccggttaacaagagaaaaagaaacagaattgattaccatgtagcattcaaacatatgggaaaaagtcagtgaggagtaactcagagaggtggttagaatctgggggtatacagcattttaacaaagaacaataaatttgtagagaagtaacaagacaaaacagaaagtcttttagaggcagcaaactgtgagaaggcagacacatggaaggaaactaatacagtaaatgataagagttattttaataagttttgttacataaacttctctctctgtggtatctctaggttgataagaatctattgttgttcccagtgattaaaggtttaagagttgctttcctcttcctggtatagaagagaggtacacacacatggaatttatgtcttgttttttaggcaaataaaggcataaagggcagagagttttttggtgcctgctatttttttaattgccttcagctaaaaaatctttatgtaaaataacctattttggagtggcatattctgatcctctacaatattaatatatttattacattcatgtattaattatattaacattacttacattttccatcccaataactttatttctttcaaacattttattgtagtgcttattttagttttctacttttttcttaatattagggcaaatgcactttatgtgtatattattcaaatatgcataggctcttgctgtatataataaaaataaggtgataataatatcagtgtagaaatcttaacatctccacatcccacatgttctcataggaatttaaatttcatgctcagatttcaaggctcccaaaatgctgatgagattcctgtaaagtccttttcatgtattaacatgtattgttctcagccactaaaaattcttcccccactacatggtgtctggcagtctttgcagctcaaaatgcataccagctacaggcttttgattgaggtgccactataactggaaaactgttgccaagggaaggaaatagaacatgttcaactctatgttacagcatttttgagtgcacaggtaggcaggaaagaccaggggtgttttttgttgttttgtgtgtgtgtgtgtgtgtgtgtgtgtgtgtgtgtgtgtgtgtgttttggagtattactgaatttagtaaaacagttcctccttttcctatagtagcacaagtttgaacgtcactaagttgggatgcatttgcctatcaactgccttgctataccaccaatcaatctccctcaaacacacagagatatttagcttaggtagctaaatctggttggttatttagatttcttctctctgatgaacttgactttcaggctagagaaattacagggaaaggggaagtagctaaacaatactttaaagagaatcagacaaactaacaagtagaaaattttaaggaaaaataggatctcattctttaggaagtcaaagaaacctgagaaaagaacgtgctaaagattgaaaataaaaacctgaagaatacaacagctggatacaaagtataatagggaactgcagactgatttgaactgacaaagagaaaagatatatggggagtgaataggggaggaaaatataaataggcagatccccaggtctaaatattgtatcttactaggaatgactactactaatcataccggttttgaaaatattctaacattaaaaaatattcatttttttataaagaaaaatactgaactatttaccggagaagacttgtttgcaatttactttaaaatgcttcactgtagaaagtatgaaatgtgatgtgcagttagcttactctctgcccttggtgtgatggattgccccaatcaggaatccacatcctaagcccctgcatcctgcagtgactggctaaagcaaaaacatctgccttctgtatcttaagaaacacatggcttcctaattagcattatgaatttaagaaaatgggattatattggtgaattttgaaggtcattcacataatagatgctagaaaactattctcactgaagaaaattggaagtattcaagatttattgactgacaaaaatattctagatgcttttttccatctttccattaaaatctaagtgagaaatcaaaaagactttccttgcagctaataaacagatcctatttactttactggatgataaacagaatggaataaggtgattaggggaacaaagaatactgagaaaaagcctgtggtcttaaacacaagttagcaagcaattaacacagctccaaagaattccaactgggcacggttttaggtcaagctcaaggccttggatggatcctggttgggttaacttaatcttcaagttagtaaacaattaacagagccccaaagaagtccaaccgggcaggtgttttaggtcaagctcaaggccctggttgggtctgggttgggctctgagatgacatcatttcagttttgcacttaaaaagtttgatcccaggtcttctgaacaccacgaatcagcaagcctggtcctctactctactttaggactagcatcccctgaattgcagagtctctcctctgtaattatttgcccatgttccccactctcactatgccaggggctgtcaaactatagcaggcaaacacaataaatctggctttagtctcttctagtatgatgtgcaatctaagaataaattttacatttttaaatggttacattttagaagaattaaattttaaatcattatatgagtacctgcttattctccttgaattttcttcctggctcacaaagcctaaaatatttactatctagcgctttacaggatactgtttgccagtgcctgcactatgctgataagtagggttaagtcacagcataacccaaggctggaccggctcaaggagaacaaaaggaccctatctatacactaatgcagctgcaggaactggccaacataaacttgcaggagctgatagagcacatgagggccaaagcctaaagatgctagatcaaaggaactctccaaaaactgaaaagggatatgagcccttgtactttggcttaattttctattacagtggcagcaaattgtcacaaactggaggagttaaaacaacacaaatttactatcttacagttctatgggtgagtagttgcatatatgtcctgtgaactaaaatcaagatgctgtcagggctgcattattttctagtgctctagggaagaatgcatttttctggccttttccaagtttcagaagatgcccacatttcttggctcatggcctccttcctccatcttcaaagccagctagcttgcatcttttcaaaggtgcttcctcatgatctctctccatattcaaagccagctagcttgcatcttttcaaagctgcttcctcacgatctctctctctctctctcttctccacaaatatgaaagattctttgtacctacatgaatagtttggccccaccaagataatccaagataatcttcacatatcaagatccttaaccttaatcctatgtgcaaaatccttttgctacatatgataacatattcatcaattctgcagatttgagcatagatgtctctgggggccctttattcagcctaacacatctttgcttgttttgggagatttgaaatgtagtaattttttatttacttcagagggaatattcaaacataacccagactactgaaaatttcactaaggtgatatatccttgaattgatctgaaccagatgagcaaaagtattaaataatgtgctgggcttggtaagacaacatgcaccctagaaagtgagagataaacacatgtggcttcagagtagtgaggtaactttgtaattgagtatccctgcctcaaaatgcattttaaaactcattttcttttcttgctttcagccttgaaacatacttgaatatttttgtttctccctttcccaccaggcacttctgtgaacagtgcttgcttgcctaactatatgcttgcttagaaattccaggggtcaattttgaaacaaaccaggcaaaaatattcagctgtagaatcctatcacttagtgggggttagggagagttagcccacctacaccccactgaagtcaggattgcctgatcaggacttccagaggggcaattactcaagataaccacggaaatgacacatagacctgcgccactcctttcccccactttttgctcccacactttttgctccttaaaccccttcactcagcccccaaatttggaagctcatgctttgaaggcagtctggcgattcccccactgctagatttgagtaataaaactgcttttctttcaccacacctcacgtaggttttcagcatctgtggggcaaacagccaggcttgagccagttacaagtttatggtcaatggatgaaaaaaagggaaagcccaggctcggttcattaactgatacgagtaagctcagtattcatattagagaaggaagtaaatggaggctggtctacagccccatcgggtgtggtcatgaaataaagcagtgaggagaaattatctcattaagcagagcttttggtggtatacatggatggacaactaatctgggtataaagaaaagtggccaagttctagttctcttaaaactggacaagccccctgcactgcatcctatgtcccctgctgataaaaaactaaaattcaattgagaactctgagaagttaaactcaagtgggcagattgtaaagggaacctaaaagctaaagaagcagtctgcaaagggacgaatttccagatttttcttctcattttagctctcataacttgattcccaagggtgggattcagtcacattgctgatcaggggaacaatggtgtagaaggctaaaacactgatgtataccctatttttctggacaacaggataagataaaaggtcccctgttgcctggagagtgaaaggtagggatcctggaaggggaacagttggagaaagggattccttaattctgcatataaaccacacaagtctctaggctatcccagagcatgcattagacagactccaaaacaacactgcaaaggttttgagaattgaactaaaatttgagttgccatcccaaactcagatttacccctgaatggcacacacatgagacaagctcaaagcagagtgacaagggctttgaaaaataaataagatctagacaatggtcaaagttacaattaccccctgagtaacacttgcacatgatagatccaaagcagcataacaaaggctctccaaactgcactgggattgaaactatcacttacagaaagcaagatacaacttgtgacttaaacctataaggatttatgcacaaaatgaataaataataataaaaaattctccaggatgttataaatgtacccagaatatacacaaaatccaaaatcattagatatacaaagaaccagaaaaattttatcaaagctcaaggaaatatcaatcaacataggccagctgtaagatattttagttattggaatgatcaaatcagttatttaaagcagctattttattattgtagtatatataccacatgaaataatttaagcacacttggatgttttttataacaaaaaaattaaaacttaccttgagaggtgacagcttgctggcagcgctcacagccctggctcgctctgggcgcctcctcggccttggcgcccactctggctgcgcttgaggagcccttcagcccgcggctgcactgcggtagccactttctgggctggccaaggccggagccggctccctcagcttgcggggaggtgtggagggagaggcgtgggcgggaaccggcgcttgccggccagcgcgagttccaggtgaacgtgggctcggcaggcccggcactcggagcggccggccggggcagtgaggggcttagcacctgggccagcagctgctgtgctcgatttctcgccgggccttagctgcctccccgcggggcagggctcgggacctgcagcccgccatgcctgagcctccccctaacccgccgtgggctcctgtgccgcgtgagcctcccctacgagcaccgccccctgctccacggcgcccagtcccatcgaccgcccaagggctgaggagtgcgggcggaccgggcgggactggcaggcagctccacctgcgccggtgcgggatccactaggtgaaaccagctgggctcctgagtctggtggggacttggagaacctttatgtctagctaagggattgtgaatacaccaatcgacactctgtatctagctcaaggtttgtaaacacaccaatcagcaccctgtgtctagctcagggattgtgaatgcaccaataggcactctgtatctagctcaaggtttgtaaatacaccaatcgacactctgtatctacctaatctagtggggacatggagaacttttgtgtctagctcagggattgtaaacacaccaatcagcaccctgtcaaaacggaccaatcagttctctgtaaaagagaccaagcagctctctgtaaaatggaccaatcagcaggatgtgggtggggccagataagagaataaaagcaggctgccccagccagcagtggcaacgtgctggggtctccttctccaatgtgggaggtttgttcttttgctctttgcaataaatcttgctgctgctcactctttgggtccacgctgcctttatgagctgtagcactcactgggaaggtctacagcttcactcctgcagccagcgagaccacgaacccaccgggaggaacaaacaactccagacgtgccaccttaagagctgtaacactcaccgcggaggtctgcagcttcacttcctgagccagcgagaccacgaacccaccagaaggaagaaactccgaacacatccgaacatcagaaggaacaaactccagacacgccacctttaagaactgtaacactcactgccagggtccgcggcttcattcttgaagtcagtgggaccaagaacccaccaattccggacacaaccgaatgggtccaatagtagaaactaaatttttaaaaaattgtgggtgatttgaaagtagattcatagctaccatgtaacctgacaacagcgattttaaacattgagtaacaaataagaataacaacaataaatggaaaaaaacccagagagcctcacatggggcaaaatcaaatggtctgatgtaagtgtcttttgagaccagaaggagagaagaaagcaattggggaaaaaaaacagaactcacagaccttttccattttaagttcactgtttacatctcatcctgcagtcccaagtaatcacaagggaggctgcagactggctagcctctgacgttagtaggacccagagcaagaatataaacgtaggggcctacgttttatatggttacatgtctaaaattgataaacctagccaaaagattgttgagtaagatgagatttagcctctcaccttgagaattatacattacaggacagttctccagatggccttagtaccaactctgtttactccttttctcatttgtagttctcaagaataaccatagaacatgtggaagtagttggaacagcccaggttctgttctagtctctcccgagaacaggttgtcctacagtgttttaggctagcgtgtcatattacgctcagggtgcaaaacccaggaagggttgttttccatgatccctcatctgtggcgcaaatggggcccgtacagatgactccatctgacctgagtagatttcccaaggcttggggcaccaggtctcaatgaatcctggacttttcttgtccattgctatctataagtaataaacctactttacataacttgttataggtgtgtgtgttctatctcaccagacacaaacaaactggtaaccagtgcacggtgaacttgcttcacatacgtaaataacaacatataaggacataacttgagacttctgtgactcctcagaattttgtccaggatcttggtagtgcagagaaagtataccaccctcccacccttttctaatgggcatgggttcaccccatttattttcctacacctgtctctgttttgcataataaggactctaaaaaacacctgtgcagatactccagcctccaaccatatcctatgtaaagagccaaatcttggcacccctttgtcctaggggcgcacatactctctgttggattgtccgtaagaggacagctccataaggcctgcataatctctggggcagtcatgggttgatctgaataggaaattccaagatgctgggtagcatggatgagacagcagatgtgggctaaggacattcctttagaatctgtaaagcctttaccccataaggagcatggtcagcagtggccaggactgggccttgaaaatacagggctcaagccagcagtctttcccccatttaagggtgcaacaggatgatgaatttttttgcctgggcattttctcaaaataaactttaagttctgttacagtgagaaagcagaaaattttaagaagtcagaagactacagtatctgtgatagaattcagaaacggtcattatttctgtcctatttgacactgcataatcacttttatcaacagtatattttgattaaattttcaacaagtttagaaaaaattatttctataaaagattaaggtattaaacctcagacaagcccatgcagtgcccaaagtctcatgcatgctctagttgttggactcctaaaatgagttactcccttctttgttaattgtagtacatattaagtaattccatatatgaaatgtgaaaatcaaaagcaaataatgaatgtgaagaatataaaagcttattatttggccttcatcaacacagtttcatgcatttagcaagcactaagtagatatttagtaaacaactggattttggtattatattgaatgaaaataggaatcagaatgattctaaagtatgactagaatctccatgctttgggtcttttttattataaaatttttatatgataaaattcaggagatactgttagagattttaagagtaaatgtgagtaataacaacaaagatattttctgaatggaatcttgtgtctttgccactctacatttgatttatttgtatgagttagtcactgatggttctcaaattaaaaatattgttatattttccaaaattttataaggaataaatatacctaattatacagaatttaattgtcttttctgagattacacagaaagtgagttttagaactgtaattagaatctttaacgtgttttggtccatttgtactgtgggccaaagtatcttgcaagtttaaagatttagataggtcagtgttaatgagaggaaaataaggttgttatcaataaggttgataataaaacgataataggaaaataaggtaggctggagagcggagcagtccagataatcacaaactttaaaaaaatagaagacagctccaaatagcatgtatagtctaaaagatttagctatgattgtaccattgcactacagcctgggcaacaaagggcatattcatacaaacggaacaatgttattttatcaaggtattagattgtcatccaaaacacatatggttgaagtatcaactctggtaaggatgctatgggccagagaatacaaagtaagtgagactctgtctgaaaaaaaaaaaaaaaaaagaaagaaagaaaaagaaaggcaataacacaaacaaaaatgccctatggtcataagtccttaggacagagggagaatatcagtcaagtaaaatttccaaaacgtcatcacagaaacacacacattcaccatcctcgcccagcacacactccacattgtctacaattagtccattactgcatttgggtctgtattctctgacccatagcatccttaacagagttgatacttcaaccatatgtgctttggatgataatctaataccttgacaaaataacgttgttacccttgtgtgaatatagcaaatttggaaaatttcaaataagtcatatccatggtcttatatatttgtgcaaatttagatattgtgaataacttttcttaaagtgtttgtaaaatttaccaaaatgtaagattaggcatgcttgcattttcaattatattaattgtttttcagtttgtgattttaagttgaaagacatgtcagtttgtagaattactatgttatcatgataaagagaacataccatttactaagtgggtaagtttagaagattttgttaaattaattttttgagcgcttaacaagaatttgtatattccttagtttacctgacactggaagccttaagaatattaaattcattaaattttaaaatctaatttaaattacttaagaaaatatattatttatgtttattcataatttattttcttaactttgggttgatccttgaaatgactaacttctaaagccaagaaggattcgcttttttctctggaagttgttagtttaataagcaaatattattgtaaatacccaagtaaggacatgaagtttctttttgagatgatgaaatgttctaaaatggatcatgacaatagttgcccgtatctgaaaatatacctgaaaacattgaattgtactttttaagtgggtgaattgtatggcaggggtccccaacccctgggctatgaactaatgtcaattcatggcctgttaggaaccaggccgcacagcaggaggtgagccacagcaaatgaatgaagcttcatctgtatttacagccactccttattgctctcattaccgcttgagttccacctcctgttaaatcggtggtggcattagattctcacaggagtgcaaattttattgtgaactgcacatgtgagagatctaggtgacacactccttatagtaatctaatgcctgattattagccaccgtctcctattacccacagatgggaaaactctgcagggaacaatttgcaggaaaacaagctcagggctcccattgattctacatgatggtgaattgtataattatttcattatatattacaatgtaataataatagaaataaagtacacgataaatgtaacgtgtttacattatccccaaaccatccctccatccctaatccatggaaaaatcgtcttccatgaaaccagtccctggtgccaaaaaggttggggactgctattgtatggcatataaattgaatctcactgaggttgttttaaaaagtaagttgatatagccttcttagctcaagactcatccctcagtaaagatttaaatgctaccttatacatattattatttcttaaaataaattttaaaatagttaaagtgcccaattaaaaaaattttgattcaaaattataaatgcttttataaattgttatagcaatttatacacttatcttcagtgtatttttagttcttatcatatccagctatgcaaaagattataatccttaaagagcaaaaattttacaaaaaatctgtgatagtttttttgttcaagattcaatatctcaatacactggtttttaatataaatgtacttgagaatcagtgaggatgacattttaaaaaatgcatgttctgtatcagtctaggtctaatcaagaaagagaaaccacttagttaagggaaaatctaaagaagaattattaactataacaggaaattagagtaatgagggtttgactagtatggagtaaatattaatttaaggaatgtaggcatagtagatataaaaagagccattaccacttgggctgagatagagaacccaaggaagaatttccaccccctactaccaacccaaggctgagatctagacttttgtggagggggcacggtcatggcaaggaagttgttatagtgttgtgctgatgaaactggctggaaattcactatctaggatgccagggacagctattccctgacaattatcttgctgggagcactcagctagaaatcatctgccctgaggaagtgctggggaaagctgttggccactgaaagttgctggccacagtgaactgcagaaattaggtactagaaaatttggaagtgctgtgggagctgtggccttggatgccctgtgcaccgcaaaagcagttacaccaggaccaagcagcaaaagttttctcctacaatatttctccaccatcttttactggcaaagctttaatggaagctggcaaggaaaaacagtgaaaggggcacagatccttttacaaagagccggcagaagggtgaaattggagttgagaagcactaaattgactagaagaacaatatttttaaatatttttacgttaagaattgtccactcctttacatttaaaatgtttctatcagaaattgagttttaatatggattttaagatactttgactgtcataagtgttgataatgagtgacatttgtaagttgactttttgtttgaggtatatttttgtttatctcagatcttaatgtttctttaagaaatttattcatgtcttggtgtatgacattaaacaatttcaccagtttagaaggttcatatttttgtctctgtttatttttatgatattgtgtttttttatacttactacttttaatcccctggaaatgattgtatcgtatggcctggggacattctagtattaatatttattgaggcctcaagcccagttgtgtcgatgtgggctgtaatgtctcttgttttagctttcccccaggaagagcaatccatccagcagtccttgaggagtggttcctggagtcatacaaacaattagacctaaggcgaaaatagtgaacagaagaccttgtgatgtgtagtaaacttttcactgcaactatgcagaattttctgccagagctgctgaagcactgccccaaagtgttgtcagctgttggccttcttctgaaattgtctcaacagtagagagccagcttgcccaaggtgatgtttccttcccagagatgtctgtatgcaaagatggtttctagtggtgagtgagattggtgtaaagtgagactcctgactaaaatgttagacaatactgaagggccatgctgtcttccaaaatccccatgtggatgttggagtccatcacttagcatgtatcgtggttcaacttctccctttgcccaatgtattagtctgttctctcgctgctataaggaaatacttgagactgggtattttatttaaaaatatgttttaattggttttgcaggctgtacaggaagcattatgctggcatcttctcaacttctggggagccctcagaaaacttaacaattatagcagaaggcaaagggggagccggcacttcacatggctggcaaaggagaaagagagaggggggaaggtgccacacacttttaaacaaccagattccctgagaactcactattgcaatgacagcaccaaggcgggtggtgttaaaccatgagaaactgcccccatgattcaatcacctctcccaattcccacctccagcactggggatttcatttcaacatgagagttgggtggttacacagatacaaaccatatgactcaattgggtggttacacagatacaaaccatattactcaatcttacttttcacctatgttatcctaaaatactcgtaaagtacttttggcacactaatctccctctcagagtgtgcacaaattttcacaaattacacacacacacacacacatatatatatacacatatgtatctatgaagttagctgaagacaatagtagtttttttaacattgcactcattgagcattcatcttaataccatgctaatggttcaagtcttttcctcccataggtttgaagtgattacatgattgctctttagggactcttagttgcaagtcacattatgtaacacaactctccctaccaaccttttcttagaaagatgattgcatttagattattatgtatttattttttatactaacttaccatttgttagtctatgtccaagtttatataaatccacttatttttattcatatttgtcaaagtctgagatttatgtctctttttcactctgggttctattcctttccctataagaaggacctgtctctgtgaagttgtgttttttattttttttttaattcaagtacaatgcctttatagactttatggagctaatgaatataaaaaaagaccatcaaatacacttgttattaaatgccaattgtttaaaacaaatactctattccctcaaatgatgaatgtttgataatacattcaattagagtatgaggaggcagatacctttacaaaattctgggaaactacaaatcaactgcttttgtaaacgctgtcattacaaacatcatcatacaccattacaaggcacttttggcattcatagattttttatctgatttctctacttgttttttgacttcttgattgatgcattgtaataatgattgtacatatttatagggtaacgttgatattttgatacaaacatacatacaaacaacgtgtaatcatcaaatcaaggtaataaggaaatctatcaccttaaacctttatttatttgtgttggaaacatcttcactcttctagctattttgaaaaatcataaattattgctaaatatactcatcctagtatgctaccaaacactatttattccttctctctaactgtattcattccttctactttttgtattcattaatcagtctcttttaatttcccctcatttcccaggatcaagtaatcattattctcttctttacttccatgatatcatttttttttccttccacatgcaagtgagaacatacaatatttgtcttttatgcctggcttattttacttaacactctgtcccccagttccatttatgttccttctaatgacaatatttaattcctttttatggctgaataacatttattgtgtgtaaataccacattttctttatcaatttatccattgatgtataattagattgattacataacttggctattgtgaatagttctgcaatatacatgggtatgcagctatttctttgacacacagaattcttttcttttggatacataatcagtattaggattgtcagcttatatggtagatctacttttagtttttcgaaggatcttcgtactgttttccatacatttcgtactaatttacattcccaccagcagtgtaacatcattcttgtttctctgcgttctcactagcatctgtaattttttttgtctttttgatgatagccatgtaaattgggtggagataatatctcatgtgttttatttgcatttccttgattattaatgacgttgagcagttttcatgtacctgttggtaatttgtatgtgttctttttaaaaatgtttattcagatatttttgcccattcttaaattagattatttttttgcttttatgctgttgagttgtttgagtttcttatatatttttgttattactccgtcacattttcttccattctacaggttgtgtcttcactctgttgattgtttcctttcctgtgctgaagatatttagttcgatgtaataaacaaaaaaaaaaattgtctatttttgctttggttgcccgtgcttttttaagtcccaaacattatttgctcagaccaatgtcctgaaacattcccccaaggtttacatctattagttccatagtttctggtcttacattttagtctttaatctattttgatttaatttctgtataacgtgagagataggcatctagtttcatttttttttttgtctatggatatcgaatttttccgacacaatttattaaagagaccaccctttttccaatgaatgttcctgatgtttttgtcaaaaatcagttagctgaaaacatgtggattttttgagagggtttaatattctgcttcattggcctatgtttttataccaataccatgctgttcttgttactatagctttgtagtatatattttgacatcaagaattgtgatgccttcagcttcgttctgtgtgctcaggatgctttttggctaccaggagtcttctgtgactccatgtgaattttaggattgttgttcctatttctgtgaagaatataattggtattttagtagagattctattgaatctatagatcacttttgatattacattcattttcacaatattaattcaatccatgaacatgggatgtgcttcacttttttttttctgtgacctattctatttctatcactactgatttctagttttccttgtaaagatcttttgtttctttggttaattttttatctaggcactttagttaatttttttggctaccgtaaatgggatcactttattggtttcttttcctgctagttcaccgttggcatagagaaatgctaccaattttgtatgttagtttcatatcctgcaactttattgaatgtgtttatcagttttaagagttctttgatgttgtcttttgtgttttttatatataatatcaggtcacctgcaaacaggtataatttggctttctcctcttcaatttgcatgccctttatttctttctcttgcctaattgccccgtctttaacttctagcactatgttgagaaagaatggtaaaagtaaggcatacttgtctgttacagttcttagaggaaaagctttcagcttttccccattcattattatgtcatctgggggcttgtcatagatggcctgtatcgtgttaaggtgtgctccttctatagtgagtttgttgaagtttcttttttttaataaagctacattgaattttataaatttataaattttttgagtctattgagatgaccacatggtatctgcccttcattctgtggatccagtgtatcacatttattgttttgtgtctgttgaaccattcttccatccctgtgataaatcttatttgatcatggtaaatgatctttttaatgtgctggatctttttaatgtgggttcggttttctaacattttgttgaggatttttgcatctacctttattagggatattggcctatagctgtgtgtgtgtgtgtgtgtgtgtgtgtgtgtgtgtgtgtgtgtgtgtattttgcctggtttgggtatcaaggtaatgctggcctcattaaatgagttcagaagagttccctcctcttcaaatttctggaagagtttgagaagaattagtgttagttgttctttaaatgattggtagaatttagcaatgaaaccatcaggccctgggcttttctttgatagcaaactttttattgctttttcagtctcattgcattaattggtctgttcgaggttcttatttcttcatggttctatctcggtaggttttatgtgttcagaaatttgttcatttcccttaggttttccaatttattggcatacaattgtttataatagtgtccaatgatcctttgaatttctatggtatcagttataattttttgtttgtttctgattttatgtgtctttttttcttggttagtctaactgatgatttgttgatttttttatatttttaaaaaaccaaatttcactttatagctaatttgaattagttttagtctcaatttcatttatttctactctgatctttattatttcttttcttttaataatttggggtttggattgttcttacacttctagttctttgtgatgaatcattaggttgtttgtttgaaatttttctactcttttgatgtaggcatttattgcgataaacttcttttctaatactacttttgcattatagcttagtttttggaaaattgtatttctattttcatttgtttcaggaaacatctaaatttccttttaaatttattcatggactcattggtcattcaggaatgtgtcatttaattttcataatcttgtgcagtttaaagtttctctaattttttatttttagatttatatcattgtgatcagaaaagatacacgatatgaattccgttcttttaaatttgttaagaattgttttgtggcctaacatttggcctctcctggagaacgctgtaaaggctgatgaaaaaagatgtgcattcttcagctgttggatgaaatgttccacagatgtctgttagaaccacttggtctaaattgcagtttaaattcaacatttccttgacgattttctgtctagataatctgtcgaatgctgaaagtgcagtggttctccaaatattattttattggaatctatctcttcttttaggtcaaataatatttgctttatacatctgggtgctccagtattgcaagcatgtatatttgcaattattatgtcctcttgctgaacagttccctctttcattatatagtgatgctctttgtctctctttacagttttttattgaagcctgtttcgtgtagttaatcctgctcatttttcatttctgtttgtataaaatgtctttctctatcacttcatatttagtttatatgtgtctttaaagtaagtgtcttgtaggcagtatatagatacctcattttttttaattcattcatcacattatattttttaagtggaggaatttatttttgttgaaggttatcattgataggtaatgatttacccttgttattttgctaattattttctgtttgttttgtatactctttcttttcttcctcttttattattattgttattttgttttctgtaattaaaatgcttaatcttttctctttttcttttgtatatctgctctaccagtgagttttacagttttgcatgtttttatgatggtgattattgtcttttcatttccagatgcaggatgcccttgaacatttcttgaaggctggttcagtgatgacaaattccctcagtttttgctttcctgggaaagattatacttttcccttatttctaaataatggctctgttagggatagtattatttgcttgcaatttatttttcttcagtactttgaatatattatcccattctctcccttgcctgtaagacttctgctgacatatcagctttttgtctaatggagatttccttatatgtgacttgaaacatttctcttgctgttttcggaattctccctgtgtctttgacttttgacaatttgactataatgtacctcaaagagagcatgtttgggttgaatttattgggacaactttgagcttccaggatctgagtgacaatatctctccccagccttgaatagtttctcagctatatctcaattaaataggtttgctgtgactttttccaactctttctctggaaactctataatacaggtatttgtttgcttaatagtgtctcatagtactataggcattcttcattcttttttattctttttttccctcttgctggataatttcaaattatgtatctttaaactcggagattatttattctgtctgatcaaagtcttctgctgaagttctctgttgtatgttttatttcattcattaaattatttagctgaagaatttctgttttgttctttttttaataataccctgaattctttgttcgtgttataaattattttcctaggtttgttgaattatctatctgttttgttttgttttgtttttatatcttgtggagtttttttaagattgttatttagaattctttttctggcaattcattgatttcctttacattggaaaggactctcattagagagtttttatattcctttggtcatgttatatttccttctgttttcatatttcttttgtttctgtgttgatgtctgtccatctagcataacaaataacagtaccctcttccaaattttctagagtggttttcacagagatagacttttacctgaagatgagtctcagtgtgccagttaggaaggatgtggtgactttcttttttttccaggtgagtacagtgttttagtcttcatgcagcttcttcagctgttttcaacctcagtaatagattcaggcacctcagtggcctaggctgtagaagtttgtggcagcagtgacagcaggttaggtttttaatgtttttggtggcaagggattttgggaatccttctattctcatattcaccacaagagggagactttgacaagacgacccctcttgatgtcagttctgacatttcctataagcagctgccacagcaactggattctagatgcaggtacttggagcagcagtggagacagggtcttagtctgagtgtcttatgaacctattgaggcacctgtcttggggtgcatgtcaggtttgacgtctgtggcaggattggatgtagatatcccacaccaggatctgaggtaccctctatcaacttggtttcaggggcgtggcttgtagatgtgaccttccttctggggaggcagagaacagccctaccacaactccagggaaagaagggttctctagaaatttgagcttagggacaattggaattcaggattctgagtcagtagggctcaatggcaactttaacccgtggggacaaggagtactgtgtagtagtcactccagatcttggcattgcggggttcagcagtatcccagactgtgaagccaggtgtagcaacaagtatccaagaaatggcaagcttggctacagtttgggccctgggtgcataaggcggtacaggggtgactccacttcctggaaagaggagcatctcagcagctcaaattccatggggctactccatctccaggaagcaagatactagagttgtttggcttttaggacagagtgtttcagctcagccttgggaagtgcagctgctcagctcaaccaaggctctacttccccagtgggcaatgtgccacttcagctcaggcccacgcgggtgtgactattctgggcagcccagccaccattttcttgtgattcagtgctctgccaaagcactgtttcctttggtggctatgcacagtttttgatcagcttcctaaaagcagggcacaactgtgcctgagaggctgatggagttgttctaccaaatcactgtttccccagatttccatctgtgcagcttcagctcctgcctgagcaggttgggggatgggtaggtggggcactttcactcctttttgatcccatagggaagggtgtaattgttgctcacagctgggctttgggatgttgggtcactgggaacgagtggttcaacagcagtttagcctctgggttgaaggagtgctgtggcttcttgttgctggagcgtgatatactttagcattagtttcagttccaggatggtgtaacatagcagctctgcaggccacagggagtggggaggagtgtcagtttcttctcagggggaaatatgactgcgtggcctctaggaatttttcttacctaggcttagtgcctggaaggactttaagggaccctagtggtaaagactgtagatgtctaagttctcctgcctgagaaagtaggaggagagttaggtagagcagttctattgcctctaggccccgcaaggaaggtataattgctgctggaagctcagcttgggaatgttgggccaactggtgaattaataagcaataaattagtaacaggtaatacatacattttataagttctaaacattttgattattctgtaagtcactagctaacacattcccagagaagttgccaaatttaactaatattttctaagctcaagtccctctaaaatgtccaccaaagggtctgaatgggattaaaaagacattgaaaaatcttgtcattacataactgaaaattaaaacaaccactacacatttattagaatggccaaaatccaaagcactgacaacatcaaatgctgataaggatgtggagaaacagaagctttcattttttgctgatgggaatgcaaaatggagcagtcactttggaagacagtttggtagtttcttacaacactaaacacactcttaccatatgatacagcaatcctgcttcttgatatttacccaaataagtaaaaaaaaaaaaaatacacgtccacacaaaaacttgcacacagatgtttacagcagttctttttataattggcaataatttaaaaaaactgagatgtgcttcggtagttgaatggatgaacaaactgtgcttcatacagacaatggaagagtattcagcgctaaaaaggaatgagcaatcaagccccgacaagacctataggagacataaatatgtattacttagtgaaagaagccaatggcagatgttgtatcattctaactaattggcattctagaaaagacaaactatggagacagtacaagaataaataaatggttgccagaagttagggaggagaaaagaatgaagaggtagagcacagagaatgtttagagtagtgaaatgcctctgtgataccacagtggtgaatacatgtcattatacttcgatacctctgtcaaaacccatagaatgtaaaataccaaaagtgaaacctaatgcaaatcctggactttagatgataatgatttgtcagtgtaggctcattgagtctaacaaatgtgtcactgtggtgaagaatacccattgtatggaagattatgtgtgtttggtaacgggggcaggaagtatgtggaaaccttgtgaaacttgtcgattttactgtgaagctgaaacgtctgtaaaaaaattaaatgttattaatttaagaaatgcattgacagtagtttacttttcaaacctcagaattcattcataatatattccaccttctcaaaaacagagtttgttaataaagtcttgtgagtttttgttttttggttttttggcaattactttgaaatgtgaaattgtccctcacacaatttctgctatagaaagtttacgattatcatgttattttaaaaagcctctccaaggctgggcacaatggctcacacctgtaatcctaacactttaggaaggtgaggcaggcggatcatttaaggccaggagttcaagaccagccggtcaatatggggaaaccttgtctctactaaaaatacaaaaattagccaggcgtgatgttgcatgcctgtaatcccagctactgaacacaggaggcagtggttccagtgagttatcatcacaccactgcactccagcctgggtgacagagagaaactctgtctcaaaaaaaaaaaaaaaaaaaaaaaaatcaaagaaaaaatttttatatgaggctgtatatttcatatgcagaaaactacatgatttgtcaagagttctgagtttattttctaatcccatttttttcttaactaagcaggtcaacttcagcaaggttttgttgtgttttggttttcctcctaaggctgtttttcacttataaaatgagttaaagtaaatggcctccaaggtcccttcacactaatctaaactacctgtaaaaacattcttgaagccctttaaacttgtgtcaaagaatatgacctcatgaaaaaggtgctggtccatggcttctacgtgtaataatcaaaaattcaggtcaagccaaatagaaaatgcaacagaccatcaaaatcaatatattgtaataagctttcttatttatttgttttcttaataacatattgatttagaattcaatataaaactaatcaatttatcagaatcaaattccaatttgtagtttgaaaaaccattgattaagaaatcagagtcacacggaagtgctggatatgtctattaccttgatcgtagtgttggtatcaaaggtgttttcatacctccaaactcatcaaattgtgcatattaaatatgtgtgttttattgtatattaatcatcactcaataaaactattaaaaaatagaacaaggccaggcataatggctcatgcctgtaatctcaacactttgggaagctgaggcaggaggatcacctgaagtcaggagtttgagactaggctggccaaaatggtgaaaccccatctctactaaaaatacaaaaaattaactgggagtggtggagcatgcctgtgatcccagctactcgggaggctgagacaggagaattgcttgaacctgggaggcggaggttgcagtgagctgagatcgtgccactgcactccagcctgggtgacacagcaagactccgtctcaaaaaaaaaaaaatagaacctcagaaatatagcatttaaaaaaaaatccctattctcacaaaagacatcaaggaacactatagtttgtttgaatatcaagtttatatcctcatacattcacagtcacagtgggattaggtttggcccgtatataaagcaaatttgtaacatgaaattttacattaaaaaatcacataattatactagacaacactgctttgaagtcataattttatgtttgcaataagcatcagaatctcccgaataattatttgaaaataaatgtatctgggaccttctccccaaaaaccccaatttagtttgcagctcccttgttgatcatgagctagtctactagttgtgaggaaaggctcttctaatacaaattccctatgactgcaaatggatctttaagacaaaatgtctgattgttagctgcactaaacatctttctattaactttctgaggttgttagaacatttttgccttttgcctgttcccctcttctcagaaaattcttgatttaccaaggtcctcctcaccttaaaaattcaatccagatattttgggaacaaggcaagatggtgtacgggaagcaggttttgtgtgcccctctcacagagatgaaacaaaagggctagtgaacactgacccttcaggtcaatcatataaaagaagacatcaggatccctgaaggcagcagggcaattcagagatcagataggagcgaagctgggcaccagactgtctgggttcagtgtggaggaggagaagctctccaacacaagaaaagataaatgagaggccccacggagattcaagctctccacagggacctgtgcaaccctgggaacaggagaatcccctgggtccccctccactgcacttctagactgaggcagagagccacctggactttttgcaggggcaaccttcaagtccaaatgacctctacaaaactttggccctggagtagagcagcaccagcgtcatagcttcaatagaggctgcagttgcagtacctgagagcaataagactgctccacccctccttgctggacagggctcagtgtcaggttctggcccagcagtcccccttcagcccaaattcgactagccactccacctacccccaccagcgatagccaggatggcattgcttgctagagcttctggcccagtggtgccacttctgtgtgaactcagctggaggtcacagttttctgttgtcccaggaaacacctgaattgcagagtgcgtgactccacctgcccctgtcactagtagcccggtgggcaacacctgctagagctcctggctcggcagctccacttctgtctgagctcagctacagggaacagcttcttgttgtccccgaacagcagaacaacagagcatgcaactcagcccaccactgccgctggtagcaaggtgggcaattgcttcctagagcttccagttcagtggctctgcttctgtgtaaactcagctagagggtgcagcttcctgtagttctggaaaacaccaccacccagatagcagagcatgtgacactttacccagctgggcaacacttgctacagcttctgcgccagcaccccacttctatgtaagttcagccactgggtgcagcctcttgctgtcccaggtagcacccagacagaagcacaggtgaccccactgagccctgcctctgatagccaggtgggcaatgcctgctagagtttctagcccagtggtcctgcttctgtgagaacttagccagtgagcacagccttctattgtcccaggaagcttctggatggcagggtaggcacacccatccacccctgccatttatagccagacaagccacacctgctgaagctaacagtacagtggtcctacttctgccagaatttgctgaggaatgcagcctcctgttgcgttagaaatacacagttggcaaggcatgtaactccatccacctccacttcgcatagccagatgggtcacatctgctagatcttccagtgcagcagtcctgcttccacctgaattccgtggacaggagcaaccctgggtttcccccaggaagcacatgaacagcatatcagcgttgacctaacaaagatacagcttgtctgccagccatagcctctgcctgagggagccacatggaccacatggaccagaatagccaacaaaagaattgtgggcatagagaccataatcacagagggttcctccatgacccaggagtggagaagaatcgaaaccagtcaaccgaactccctctataccataatcaaacccccaagggcatcaatgaaggaaagagaaaaaaaaatctatcaaaaggacagcaaattcatcagcccacacaaatgacaaagaaacagcacaggaactctggcaactcaaaaagccagaatgcattctttcttccaaatgattgcacttattccccagcacgatttcttaaccaggttgaaaaggctgaaaagacagaaatagaaatcagactatggatagcaaagaaaataatcaagattcaggagaacatcaaaacccaatccaaagaaggtaagaattataataaaatgatacaagaacagatagacaaaatagccattactgatccacaaaagcgccaaactgatcttacagagctgaaacttatactacaagaattgcataatgcaactgcaattattaacagcaaagtagatcaacctaaggaaagaacctcagagcttgaagactggctcactgaaatgacccagtcagacaaaaatgaaggaaaaataattataaagcatgaacaaaacctccacaaatatggaattatgtaaagacctcatatctatgactcattggcatccctgcaagagatgagtagaaagtaagcaacttagaaaacacgtttcattgtatcatccatgtaaacttccccagcatcactagagaggccaaaattcaaatccaggaaatgcagagaatggctgcaagatattacacaagaagaccatccccaaatcacataattatcagtttctccaaggccaaaatgagataaaaaaaattgttaaagaaggtgcaaaacctccttaatctgacaaacaacttcagctgggtttcaagatacaaaatcagtgtacaaaaatcaatagcattcctatataccagtaacatccaagtcaagaagcaaatcagaaacacaatcccattcacaattgccacaaaaagaatagaatacctagaaatacagctaacaagggaggtgaaacatctctttcatgagaactacagaacactgttcaaagaaatcagagatgacataaacaaatggaagaacatttcatgcttacggataataagaggcaatatcctcaaaatggttatactgcccaaagaaatttacagattcaatgctatttcttttaaactgccaatgatattctttacataattagaaaaagttgttttaaaattcatatggaaccaaaaaagagtctgaatagccaaagcaatcctcagcaaaaagggcaaagctggaggcattgtgttacccaatgttaaactatattacagggctacagtaaccaaaacagcatggtactggtagaaaaacaaacacatagaccagttgaacagaatacagaacccagaaataatgctgcaaacctacaaccatctcatcttcaacatagatgaaaagttaagcaaaggggaaaggactccccactcaataaaatgttctcggataactggctatccatatgcagaagattgaaactggaccccctccttatacaatatacaaaaatcaatgcaagatgaattaaaaactgaaatgtaaaacctaaaactataataaccctgttagataacctagtaaatatcattctggaggtagtacttggcaaataattgttgatgaagacaccaaaagcaattattaatacaacaaaaataaaaattgacaaatggaatctaattaaaataaagggcttctgcacagcaaaagaaactattaacggagtaaacagacaacctacataatgagagacaatatttgcaaactctgcattaaacaaaggtcaaatatccagaatctatgaggaacttaaacaagtttacaagcaaaaactaagcaaccctgctaaaaagtgggcaaaggacatgaacagacatttttcaaaagaaagcatacagaaggccaacaagcatacgaaaaaaagctcaatatcactgatcattagggaaacgtaaaccaaaaccacaatgatatacacctcacaccattcaaaaaggctattaataaaaagccaaaaaatgatagatgctggcgagtggtggagaaaagaaaacatgtatacagtgttggtgggagtgcaaattagttagcaaatcattatgaaagacagtgtggcaattccttaaagaccaaaaacagaactactattcgacccagaaaacccattattgggtatgtaccatacagaatataaattgtttacataaatatacatgcatatgtatgttcatcgcagtattattcacaaaaggaaagacataaaatcaacctaaatgcccattgacggtagattgaagaaaatatggtacatatacaccatggaatactactcagtaataaaaaacggtgagatcatttcctttgcagcaatgttaatggagctagaggccactatcttaagcaaactatccctggaacagaaaaacattcattgtgtgttaggaatgtgcattaggatcattgtgtgacaatgataggtttatattgtatctcatccactagattatcagtttatagggcagtattcaagtatgcaagcatgttactaaatagtaacagtaaaaattgctttatcaaattgcttataagtgaaaaccacatgttttcacttataagcaggagctaaacaaccataacatatggatgctaggaaagtaacaacagatactggggcctacttgaggggagaggttagtaggagggagaggaccagaaaaaaatacctattggttactatgtttataacccaggtgacaaaattatccgtacaacgaatccctgtgacattcaatttacctgtataacaaacctgcacatgtatccctgaacctaacataaaagttaaaacaaacgcaatccaagaattgtctttctatgaggccttctcttagtctcctacctcatgctccagagggcttcgctaattcttctatcagcacttagcacattgcctgacagtggtctgtttatattatatctcatccactaggttatcagtttataaggcagtattcaagtatgtaagcatattactaaacaataacaataaaagttgctttatcaaattgcttaaaataaaccttagtagtgatggcccagctgtaacaggatcacagcaattccatgtcatgacattgtgattctcagacaacatcagcttcatttccttgtgttgtttttttggcagtgatagcatttagatgacaattttcagaaaactctgttaatattcttggcagatatttaaccttatgaaaagaaatcacttattgaggacttcagtacagtattttcatttcaatgacatttaaaatgaaaaggagtccattttcttttcagaatttttgaatatgcttcagtttaaaagtaaactcattcagtgaatagtcaactagcacaaaaatcagaatataagcgatttttttaagcaggctttttttttcaatgtggctcttatatttgatatatcctatgatacacatttgactattaacaacaagtgaagcatacaaatttatcttcaaaaatatggtaattttttagtacatataatgaattaaaatttattgctctatgcataggagataatttacataatttcagtatatctttttagcctttagtcaactcagaaaaataagtcacttaaaaatgtatgtttctattttattttcagattttgtattaatagcttttaaatcttatcctatttttatatgattacaatactatagtaatttatagaagggagttgaaaacatagtgaaaatataactaatttctaaaatatttgtagtcacttttattatggattttcaacattcttttctaataaagagaagggttaatgaatgagtttaataggatacctataataaactacttttaaggtgaatgtgactggattgttttggttgtgcttgcttttccatgtcttagggtaacctcagttttctcagaacacaatattaagtctaaatccaaaagcctattgggtaatatagatttaatgagagaaggaagagttacctgcaccttacctagcccatttatcttctaaaaataaaatatttgtaaacatttttctgtttctcaatggcttctcttcttgtgtttcacgtgtcatttttccatttactattcaccaactatctcattagcttacaaataacctggttcaagcaattgtcccacatctcctattacattgcactgagcactcagtgaactaaaaagtaatcaatattgccaagcaaaagaaacaaagcaaaacgggataaaactttagtttacacctgactctcacttttcacatttgtgaatgtgaaagcgaagagatcaaaatcaggttcctttcataaagctattacgcactgctgcattcaaaacagcagtagcaaaagatgtaaggataaatgtgctcacacttttaaaatcatgacactaaaataatgtttcttgattcatatgtgaaatcagattacactatagtcaggctggtatttatctggaaatttactctgagctatcatatttcaccctggctcatcctcttggccatctctagttaaaccagcaatggacctttttccaagctggttcatcaccttgtatctccataaatttgtaattaggagcaattggccagttcacatggctgaaattataagacaaaatttgagtattgcatctatatagaaagacctgttttgccctgtaatctagggaagcaaaaaatgctcttctagacgtggaaaataactgagagagagagagagagagagagagaaaccaggagagaaaaaaaatcatggaaagagaggccaagggatttacagtgttggttccagtttctaagatctcctacacttctgtttttgccctgtatgaggcattttaaagtttgttctgttaaacatttttaaagtataaaatagcatatagggttgtagggtatctgtatttgtggctctgttcaaacaaaggcaagaaacaataaactttgcaataaatagatgagatgtattcaggaaaggagtaggaacagaacaagagagtagttgtggatacccgagaaataaacaactttccaaattctcagttctcaaggtttccccttgtgttttctggtcagaattgagcacgtgagtccattaattaacacatcaattatgaaaaggcagataatgcagaggggtgagcatgcagaaaattattaccgctttatgtgaaatcagtacattcttaggagacatcacaaatgtgaaaaaaaaaagtttgtaataagaaacatagctcttgactcttattctccatgggtcatgcattattttcaatgtttaaatccattattcctccccatttaagagatctgtgcacggagactcacatcaatgcttgaggagacagaaagccaaatgccgaagttgatttgaccatgagttatgcagagggttatgatttgattaggagtttgtgcaccaggctgtcatcgcaatctctccagtatcttttgtctttcctgttgtgtagtttagatgatattttgaatagtatagtttaattaatactgtgatgatatacaacatttgatttataaaatttaaactatatctttcttgtcttcttaacaaaattattgatcactttctgtttctttttagcttccataacattatagttcccatgtaacaatttataattatctaaatttttgccatgcgttattgaggaaaaaatcttaaatgcatatctgctaaaagttatacaaattacactgatggtatcgtgtacatcaatccattatcttgtaagctttctctataaaggagaaaatgaaacaaaaatgacaagaaaataatttatagtaccttacagacaagatgttttcatgaagaaatgagttaaataagaagttttaaataagttaaaaggcctatagaaaatttctattttcatacagttgcatactaaatccttaacctaattgaacacatatctgaaaaaaacatacttataattgactctgtagtctagaaaataaataatttatagatatcatactttttaaaagtttttaaaatgaaactgataaattataaatacaattttaattagttataatgaatacattatgaattaatatgtgatttactctagaatttattaatcaccaaataagaattttcactgttaaaattatcatagcttgttgttgctttcaacctaataatctgctattagccacatatttggaatgtattcttactcccatgcctacctgttcctcgaggtggtatcttctaaaatgaatgtggactcttggtttcagagatgttgctctttatgttcctttatgttctctgcagcctgcaaaaatgttgcattcatggaatccctacagagcagaagaatgcttcctatatatctcactatctttttttgttttgtttttgagacaggggcttgctctgtcacctgggttggagtgcaatggcacacacatagcccactgcaagctcgatttcccaggctcaagcagtcctccaacctcaacctcctaagtagatgggactaaaggcctgtgtcactacacccggctatttttttttttaaatatttttagtagagagaggatcttgctttgttgtcaggctagtctcaaaatcctgggctcaagtgatgctcctgccttggcttcccaaagacctgggattacaggcatgagccatcaccctggccatcttcactacccttgacatatctatgtatcttcgctgttcttgatgtaagttgaatcaatgaggtaaagagattatttcttacaaggtaccaccatcctgttaagcaagacaacttatacaaatgctcctgaacttatgatgagtttcagtctcaataaacctattgtaagttgaaaatatggtaagttaaaaatacatttaatgtatctaacctactgaacttaatagcttagcctagcctaccttaaacatgctcaaaacacttgccttagcctagagttgagcaaaataattttatatgaggcacattttatattgaagtgttgaatatctcatgtaatccatttaatactgtatagtaaggggaaaagaatggttggatgtatgctcaaagtgtgatttctactgaatgcatatcacttttgcaccattttaaagtttaaaaattaaatcaaaccattgtaagttggggaccacctttattctcatggcttcctacaaaagttttagcattggtacttttagataaattatttaccaccattccagaaaggggaagagaaggcttgacatctctttgcgaccttgaaccattcaaatgaatcttcatctgtttcctgcaacaccattgccaagcactgaattttcaaaaagacaatgaatatctcattaggtatagaatggaaaaaatgactgtattagttatctcttgctacctaataatattatcacaaatttagagacttaatataacatccatctatcatatcacacttttgcagatcaggattgcaggctttggttagcggggctctctgctgcagtgttaaacctgccatcaaggtgttggccagggcttcagattcctctgagatctgactggggagaaatcacctcctaatctcatgtggttgtttgcagaatttaactacttttaggctgtgaagtgacagcagtctcagtttctttctagtttttggacagaggccaccctcagctcattgcctcctcaatgtggaagtacaacatggcagctagcttcctccaggccaacaaggaagacattctcttcccagtataaatgctgcaggtttatgcaacataattatgtatggtaatcacatatatcctgtcaactttgccatattctattgaatagaagcattcatggttcctgccataccccagggaaggtgatgacacgaagctgtgaattccaggaggcagggatcatggggtccactttaaaatctgtctctaacaaaggaccttatttcaccaaaactgtgtgaaattcactttctcttcaagtttctcaacctcttattctttgagtcttggttaggtctattctggaaacttctcatatatgcctggacaagactatgttgcctgagaatgggcacaacaaatctctgaaatcacttggaacatgggcatgattcctataaggatattgttctaaaaatgtaattacttttattcagagacaatctatggaaacagaatcaaaatatattgagcatttctaccttatcagatattatcccagtgacttacaattttcacttaaaatacttttttcctattttaagaacagatgtgagccatctgtttttaatcaaaaatccatattaaattacacctttaattctggtgataagtaggaaaaacatctaaatgtaatttgacttgcgtatgtggtttcttcattaggtttattcccttttagacatgtcaaaacctcattgtcttgaatgctgatgatgtaatgaagagattaagaatttgtataccatctaaaccatgaagaggcacaggagaaaatctgaattatacaagcatgtgctgagagaatcattaaacgatttggttcatttaacattatatacccatgtgactcttccatattttcgagcaagaataaatttgagacaactgttgaatttattgttcatttattttactttaatctatgtatctaccacagaagtctgggttaaagaatcaaaatattttatgtgtctaatacacagtctttaaatacagatttaagaggtaattattgtgtaggatatagaaaatgttacatttattccgatatttatgggtaaattcatgaccacggaggaagaacttaccctaaatgattgaaagcttttctgtcaaagtagaatttaccctccatttacagacaggctagactattatagggcctggtccctggaatttcttcattgttacaagagcacaataaagagatatttctctccctgctcattagaagcaatgccagcacagctctgcagagccacaattccagattacacgagggataagaaaggagagaggagattagtgcagctgagatgatcctcctttttggcattttccctcttgagaaaacactgttatgcctttgatgccacctttctactctggctatttggagatattcataatctatatcacaaccctgaccttggccccagatagtctcatctttccaaataacagccaaagatttgtagcagggctgcattcataatagatgcaaaattaaattctactaagtctcatgttttttttttgctttcgtatttttatcatgtaaacaacatggcatattccaaaggcttaaaggataaatcctagagaaacacacataagttgaaagaggtaaatctgcaggactggagaaggagaagctgtaaccattctgcaagcgtagcaaggcaggagccaactcaagttttttatattctatcagagaacaagcaaatcactgaaagaaattctgaatgtgatgtgcatcccaaccaagcaggggacataagacaggttttccttctaggtcagaaaaccaggaggagagagagcctcatgcaacttagataccagagcccaagaatcagacagacagaaagacctccttacattaggatatggggtgtggcggtgtcacggtgggatcagttacagaacagttgcttcataatgctgccaagtgctgagaaaagttatgccagacaatgagtcatcaggcacagaaaattattggactatgtcaaaatgctttctcctaaacagcaaagtcttctgacaacttgggaaacatgacttctgctcttgtctggtacagagaagagggctggggggagcttccagaaaactgaatagcacatacatctctgaaagacaagaaataacaacacaaataaaaaggcaagatgatatttttaaaagaaaagaattgaaacaaaaacatttgttgaatgtttattgattagtaattatgtagtgaaactcttctacacactggggatacatcaggttccaacttctcacactcaggtgagagaccataaacaaataaatgattaaatgatgttgtatgtcataaaatagtacattttagaaagaaagcaaagtagacaaggacaagagtccgtgagtttgcatgtgtggggagtgggaataggattgcaattttaaatagggtagaaaggctggcttccttgagaaagtaacatttgagcacattgattaagaaggtgaccaagtgggctgggtgcggtggcttacacctgtaatctcagcactttgggaggctgaggctggcagatcatgaggtcaggagttcgagatcagcctggccaacatagtgaaacgctgtctctactaaaaatacaaaaattagctgggcatggtggcgagagcatgtagtcccagctactcgggaggctgaggcaggaaaatcgcttgaacccaggaggcagagcttgcactgaaccgagttcacaccactgcactccagcctgggcaacagagtgagactctgcctcaaaaaaaaaaaaaagaaagaaaagaaaaagaaagtgactgagtgaataatgtaggtaactctctacaaggagagagagtaaagggaaaggaagcagcccttgcaaatatcctgaagtgagaatgcaccttgacagggagcagcaaatatagagatactgccatgggatcccacttggaacattttccaatagccaaatagccaagaggccagtgccatgatttgagtatggtttttttgtacctgccagctctcatgttgaaatttgttactcagtgatggacacgaggaatgatgacaggtgtttggaccacagagacagatccccttgaatggtttggtgccattctcatggcagtgagtgagttctcactcttagttcccatgaaaacttgttgtcaaagagtctggccctttctcctctctcttgttttcagccatgtgatctgtacacacaggcttctgccaggagtggaagcagtctgaggtcctcatcagaagccaatgctaatgcctaacttcaagtacagtctgcagaactgagagccagatataaatttcttgtctttgtaaattaccaggcttcagatattccttttagcagtacaaatggactaagacagccactgtggctagtgtagagtgagccaacttgtgcctagcaggggatgagattagcgatgcaagaccacagtagcccttttaagtcaccgttacaaccaagactgttgtctgagaataagaaaatatcaaagaaagtgataagagggaggagataatatgataggttttaagagtatcactccagttgctatagtaggtgacttatgtttctttctacaatttctctaaactgtctacatttttcatattatattcataattaaaatgacaggttttttttcctcgaagctagttccaagagctagaacaacattttcatcttctaggacagtgacagacctgacaacagttaggcattggcactctaaaaacatgtagcatagtctaaatcaggggtcagccattgtgacctgagttcggaaaatgccaatataaaagtcacatgctgactgctgtgtggcaataaccactcaaatggtaaagtatctcatgcagagaagatcaagaaagagatattgtctcatccagctgcctgaaaagggaaaatattcagacacttttcacattcttcctatgatcttgaaagtcactgaacactcctcaagtattttgctttttttattgttgttgtgagaaaagacacagatggaagtcacaggctgtgaccacagtccattgttcttaagcaagattcctcaggaaactttgtgttcctacccagaatgtaaatgatctgttacaacaagagaacagtgtctggaatgtttgcaaattacctttgagatgtctctcttcatctaaaattatccttacttgttcttaatgtttccatactagcaaaaataaatccagcactgcattgctgcaaaataggtagaagttgtaattgaataacctgttgaagccaccatttctgcccagacaagttattgtcaatgtcattgttttttggttgggctgtgggtccatgtgtgggtcaacatatagcttaaataaatgtaacccataaatgactagaagagggctatgcttgaattaataatgacactgttccacggctaataataataaataattcttttcagtgtacctgaggtctatttaaaaatatattaaaaagttaaaagttggtaaaaaacaaattagctgctgtttgttacttggtatcctgggtcatcttcccttccatgataaaaatctgaaagaactataggccagtattgtttaattttaaaacaaaattagaaaacttgaagtttagaataaaattcaagccatggttttcccttactttgtattgtatttattaaaatgttttcaaagatgaaactttttgaatgttttcagagttcctgaaaaagttaaataagtcacttcttgtttgtgttttgtgggcttttgttttgttgtgtttttaaataaattttattttttagagcagtcttagctttacagcaaaattgagcagaaggtatatattttccatatattctctgcccccacatatgcataacctccccaagtatcaacatctcccaccagagaggtatatttcttataatcaatgagcctatattgacacatcgttatcacccaaagttcatagtttatattaggattcgttcttggtgttgtaagttctatggttttgcaaaaatgcataatgacatgtgttcaccattgtagtatcatacaaagtagatttactgctctaaaaatcctctgtgttccacttgtttatccctcccttttccccaagtcctggaaaccactgattcttttactgtctccctcattttgcctttccataatgtgattttgttaaaatcatacagtattcaaccttttcagattgtctctcagtaatacgcatttaagtttcctcgatgtctttttatggcatcatagcacttttttagtgctgaataatatttcattgtgtgtatataacacatattctttattaacctactgaaggacatcttgattgtttgcatgttttggcagttatgaataaagtgcctataaatatgcacgtagactgtgttttcaactcattttggtaaaaaccaaggtgtgtgattgctgctaaataccaagatgtgttattactaaatatggtaaaaacatatttaatattgtcaggaactgctcatctgtcttccaaagttgcttggcaattttgcattcctaccagagacaaatgagagttccagccagcatttggtgctgtcagttgtcaattttatgtcaatacataaaatcagtatgtattttaagagccaccaaaatgttttggatattgaccattctaataggtacataatggtagttcattgttgccttaatttgcattttcctcatggagcaacttttcatctacttttccatctttatattttctttggtgaggtgtccattaaggttttttaaagtgttctttgtatattttggatatctgtgttttatcaaacaatgtattctgcaaatattttctcccagcttgtaggttgtctatttactttattaacagtatgttttacagagaaaacatttttgattataatgaagtcaagtttattaatatctttcactgagtataccttatctggtcttgtatcttaaaagtcattgccaaactcgaggtcatctagattttctactaagcaatgtttttcaataagtaagaaattaaacacagtcaaaaaatttctaaattttatttaatattaattgactaaacttaaaatgagtattaaaaaataatgattacatttttgttattctgctgcaaccctatatggacatatttcatagagtttaatcaattttcacgtgtcacactgggtgagaatttcttaaaattgtacattcctaagagttttatcttagcctagcctacaaggaagaatcagcatgcggtacgtgaatttaagtatagtattatgaggaagtaaaggtaacacacttcaactggttaccaagcaaattcttcaaaatttctacttagctgttggtgttactgaacactttcagaagtttgccacaacttctgtcgctttcacgcggagcgcaaaagaagttgaggcaaacaaaagtaagtgttagtttcagttgagaaagactcacgagtaagtctcatgtcatttattacctctgattgaatagccctatgggtgatgaacaaggttgccaggtcatccacctcagataataagaacagaaagcaaacactatgaaaagattttgttttgttcatagtttcagatttctgttatatacagtcaacatgttttaaagatggtttactaatttcttaaagaatgaatatgtgcaaatgaagatcaatgaacatctaaatcatgtttcaaaaagagacagtaatactggccaattgccagctgcttctatccatccctccagttactacgacaggtaaaaatggagatgataaataatgctccttcaggaaaaaggtggcaaatttggttgatggggtaaatgccccatttgcttctttctttgttcattgcatttgaattttttaaaaaaaactcctttatttaatttttttagaaaacctggtcttaggtgcccacttaagttcatatgagaagggtttggaagattgagataaatggttgcatttcagctttattcctctatccattgtctctacaggaatagacaatgtaccaatgagacaataatttgcttggtggaaatactgcattacatcctctcatatgcttttcatgtgtacaccaaacctgcttttctggaaatagtaatccttccctgaaagcaagacagagactgcctggaggaaggatgcaaagataagagaagagcttcaaacttgtttagctgtcaacttctgttctcaatcttgatgtgttattacttcccctcaagttctctcagctgtttcccagagattgaacatctcctccctaccacgtgctgctaagaaactctcttatttacttgattgctactgtcattgttatcatcatttgtctgaggaaacattatggtctttgccatgctctaaagaaaattaatttgttcttttcataaggcagtgaataattactttttattttaagattatgatctaatattaaccactctcatttcctagacttctgctacgtaatggctgcccttgaattttttttcaaaagtttgtacagtgaggaatcctttcctccctcagtacctctatctcctcttaatttttagaggagtaccccagagaggttcatccacagccaaacacagaagacaatgcctaggtatagttgactcacagccttgatgaaatgctgcattctttaataccttagataaatgacactgaagttgttatccaataatatattttttcagagcatggacatatcaacatcttttatttctccaatcaaaatctttacaaatgacaagcatgcaaaactcctcatgatacagaataagatgtaaaaactgaaaaacttctcatgatttaattccttctgattgatataatatacacaaatcatttcttgagaatgacttgggtaccgatgtatcatggtatgctaggaacagtcatcaagtctatcactttcccagatgaataaatgatgctcacatggcagacggcaatgtgttcttgaccaatcaagcaaggttttccaaagatcccctatgacaccttcttcttacaacctccttactcctcagaccttagattggcattctaacaattcctgatttatatttccataaggaaggaagccctaactcagatattgagtaggagcaaggaatgatcattcttttttgcctatcattctatagcaatccataaacctcagtttcttttttcttaacctaaaagagtttagtttcattactgctggtgtggaacacacatttgttaccatgacccagacttttcttgagttataattacttctatgtgatccctacattggtctgaatgctttcccgaaggattctttaaaacaatataaaacacattctcaaaaagtgttatcattagctttcttataggtttaatcaatgtataatttttccatgcatacattagaatctatacttgggtattgtaaaatatttctattgtaatatttttgtgcaacataatgcatatttaaaatgcactaagcacctgctttatagaaaagtgctcaagttggaaaataagaaaataagaaaacccaatgatatttaaagatgaaaatataagtgatctattctacttttatttgagtccttgtttttaaaataggtaaattaagactagtaaatttaaaaatgttattattaaaaagacagtaaaacatacagtcaaatagttttaggcttcagaaaatagtttttttgaattggaataatcttcaatggtcccaaatatgtcttgaatcatatgggaatagcaactaggtttgttagtgctttatccatggtcaatcactaaaagaaagaaactgtaactgagtttatcgaggtcttataaagacttatccaactataggaataatccttcaataaatgaatagcattaccaattatagtctgtaaaaaaggaattgtccttggacttattttaagcaaatgcttatctctagaaagtctattgggagaacagtcttgttaccatgcatcattaggcaattggcagtgtgcatgtcagcagattacagaattatggctcccagtggtctaaccagttttcttcaagaatgctactaaaatcaatatcaacaaggaacaggatccagattttttaagggttgacaacagctaatctatgttgtgagacatctccccagtctgtgttcaggcagcatgtgctctaaagtttgaagaaacggagccaatagaagcctaggcagaagtcatatacaatggaaaaaggaaaaacaaaatgttaagacttggctcacgcctgtaatcccagaactttgggaggccgagggggacagatcacgaggttaagagtttgagaccaggctggccaacacagtgaaatcccatctctactaaaaatacaaaaaattagtcgggagtggtggtgggcgcctgtaatctcagctattcaggaggctcaggcaggagaatcgcttgaacccaggaggcagaggttgcagtgagctgagatcaagccattgcgctgcagtctgggcaacagtgcaagactccaactcaaaaaaaaaaaaaaaacttggaattaaaacaatgccatgtggtacactgtatctagagtttatttggatattgttttaaatactcaatgaagtttatatttttataggtattaaaaagtgacttttttttgacttagaaaaaatacctttatgtattttaagagccactaaaatgcaaaatccaattgcttgctcaatttggaacctaaaagttccaaactggagttagaagaaagggaattagaacacctctctttcaaggtcttgagcctattcaaaaaagactcaatatgacagtctggtagtatgggaaacactcttggtgtctgctgctctggtcttatgcctaaaactctacctgcattatcttcagataacttagatagaactactttctttgaatgattaaaggtcttttaattttaaatactgtgtaaaacattaagaaaataaacttgaagttatgtagaatgaaaaaggctagaggtttgatatacagcatgaagactatagttaatactgtactgtatactgaaaatctgttaacagagtatattttatgtgctctgaacatacacacacacacaagcaactatggatcatgatgcgcaaattaatttgctttactatagtattaatttcattatatttatgtatattaaaacagcatgttgtacatgttaaacgtattcaatgataaagaaaatggaaatcatcgcctttgtatttgagatttaaaaaagaaactttgcatatgtgacattttgtattcttataatgttaagagaattgtggccctgaaactgcaatacatagttcccatttacaggttcaattgcagaattgatttaaacttaggattttagattaagctctttctaaacttgttgatacaattataacattattgagaaaataaagtctaccatatttagtcacaaaactttcttgcttaaaaataaaatcaccatatattgtttatagtgcttattagaatgtgtgaaggtattaagtctgcagatggataaaactactccaaaacctctcaaaaatgactgattcaattcaatagattaaaaacagaattaaataaatgtttttatttataaatttaaaaattataatacaattgttcatacaaaaaataaatatttcttaggtctattttgcatgcagaaattattcttaagtcggtattttatttaattattattttatatttttacagacttgccttcagagttctgtaggtattttaaaaactcatatcatcaagggaaaggtacataatttggtgcatgtttctgtgctgaaggtgttctttttacaaatcaaatatcaggtttctggcgtctaatcagctttctgatatcaggtaatagaaatgaattggcagttatatcaggatctgggaaaagtgagtatctctaaacatataacacccccacacacctacccaccccatatccacgcacatcccccaacacacacacatacacacacacacacacacacacaacctatttgtgagacttaaaaacatctctggctgggcgcggtggctcacgcctgtaatcccagcaccttgggaggccgaggtgggtggatcacgaggtcaggagatccagaccattctggctaacacggagaaaccccgtctctactaaaaatacaaaaaattagccgggcgtggtggcgggcgcctatagtcccagctactcaggaggctgaggcaggagaatggtgtgaacccgggaggcggagcttgcagtgagctgagatcgcgccactgcactccagcctgggcgacagagcgagactccatctcaaaacaaacaaacaaacaaacaaatttctatagtctgtgaattcaaaggaaattagtatcctacatggctatatctgtaaacatatctgctattattatttctggttaaatgaaagtgaaatataaaccagatgaaaaaatcatctaaagaagatatctttaataactaaaacatatatcttaaacgacttaattgccgcgtttttggggtttgaaaatagatattcaacagaaatatttattgataatttatcttttatttttatttgcaaatcgctaagtcttttatccaaataacataaaggctctaattcaaaatatttgtatgtatttaaaaaatattttaatatagaaaaaagctcagaaagataattttataactatgctgcaaaacactgtttttatatatccttgtatttttcatgtgtttttcttaatttaaaatgttcatgagataatatttggaatattccacactatccaaagagaagaataagacaaaagctataataaaaatgttatgttatgtttgaataagccaagcataaaaaataggttccgtatattgttcagatttttgtcagttataaactaaaaatagtttaatctaaaactttaaatattatctacttaaaaattaaaataaaacataatgtggtatttctatgatttttgcagagtaatttttagacattagctatatttttaaggtaataatcctcttaaaaatgactaattaatgtagctgagttgattttcctaatttttacttcaaacttcttattttttaggttagtgcactgatatattctttttcattgtattttttaaattcataaaaatatattttatactatgctgccaatttgataaaaggaatgattgaaaaattcatttacaacttatgcaaaccaataagtaacaggtggctggtaattactgattttttatacatttattcttttttctgcacatgcaaatataaaatagaatttcctatcaagcaaggatttctccttgggttcttctgtccaacatgggaattagtgcccaatagtaccagatagtagaatagttaaacaggaaataacctagataagatgacattaaaactctttcttctttcttctcgccttttgaaaaggctttcatgttaaatcaaaacaaaatatacctcaacaaaaacaaaataaaacaaaataaaagcatacccaacatagcaaatagtgcagtacaataatttatggatatcctgtccataccaattcattgtgaattcttactcataaagaaattacttttaagcttttatgtatatacatgtatatatatatgcacacatatatatatgtgtgtatatatatacacacacatatgtacactactgcttattagttaataagcagtgcttatacattacttataatgcattagttattagtgcttatacattactgctatgtatgtatatatatgcactactgtttattagcattaagatatatattttctatagggtttaaatctgtaaaactcaaaacgctatacaggcattatcatattgattcggcaccataattttgatacatgaaaggcaggttttttccccatactattgatgaagaaacgaaagtacaaaccagttgttttgtccaattgactaaagaaataaattagaaagtctcaccataacttgttccctctgcaaacttcatctagataagctaatacttgcaaataccagttattcattttaatgtatccaaccagcaccatgtactgtacatgatccatcttattaaacttaacaaaaatcacatgaggaaatatccattttagtgatgagatgctgaatactaaggagtgaaatttgtccccaaaggtcaatagtggcagtaagtggaaaagccatgactcaaaacaggcattccaatgtcaaaccctattcacttacttaagcccctggatgcctattagggatggaattatgtccccgcaaaatgcatagattaaagctttacctccaatgtgactgtatttggagatagggcttttcaggaggtaattatggttcaatgagatcataatgactctaattcaataagaccggtgtccttatcagaagaagaagcagcacaccaggggatgataaggccatatgaagacagagtgagaaaacagccatctgcaagttagagaagcctcaccggaaacacttctgttagtgccttgatcttggacttccagcctccagaactgtgagaaaataactttctgatgtttaagccactcagtccctggtattctgttacagaagccagaaaggaccacgtcactggtgtctagttcagtgatttgttcccaggcctgattttggtcctccccatgctgtctttaagatgtgtatttttttttttatactttaagttctagggtacatgtgctcaacgtgcaggtttgttaacatatgtatacattgtgccatgttggtgtgctgcacccgttaactcgtcatttacattaggtatttctcctagggctatccctcccccttccccctaccccacaacaggccccggtgtgtgatggtccccaccctgtgtccaggtgttctcattgttcaattcccacctgtgagtgagaacatctggtgtttggttttctgtccttgtgatagtttgctcagaatgatggtttccagcttcatccatgtcccctacaaaggacatgaactcatccttttttatggctgcatagtattccatggtgcatatgtgccacattttcttaatccagtctatcattgatggacatttgggttggctccaagtctttgctattgtgaatagtgccacaataaacatacgtgtgcatgtgtctttatagcaacatgatttataatcctttgggtatatgtgtattcttaaagaaaacagttgtgttcatacttcctgttccttcttctccttttttttttttaattactgtaagtgaaggaaatacttgaaggctgttaatgatttgtgcttttgtaatcaggggtgaagaaacttttattttttgctcattgaacctgaaaggacttatgctacaaatgacatgatttcctttagttatctgtgtctctaccccacatgttatatatcaagtgtcttccttactgctggtcatgtctcaaagagcagtattagtagcagcagttgtcacaaaaaaacatattgacaatggaacaagccaccagaaaataatggcttgagccaaagattgtagtagtggctacattgttactattaattttgtaaatatttaatttgctcacaatttcaagtaacacttacgtttcaactcctctacccagccatacgtatctctgtgtgtttctgactgtatacatgtgtgtgtttgtttgcatacacattcttgaattgacattaatatctttgaagatttctctaagggactgaggagggtgaagtaacatgagcttgatttcttctttatatatatatatatatttttttttttattatattttaagttctagggtacctgtgcacaacatgcaggtttgctacatatgtatacatgtgccatgttggtgtgctgtacctaccaactcatcatttacattaagtatatctcctaatggtatccctccccactccccccaccccacaacaggccccggtgtgtgatgttccccttcctgtgtccaagtgttctcattgttcaattcccacccatgagtgagtgagcttgatttcagccagcttgatttctttagatcctcagaaagccattctaaattttatatctctgagcagctcaatgtacaatcataagattaatgtgctgctgttctcaggacccttctagtgagactgactctctggatgcatattatttatggattttatgttaccttctaaaatgagcatgagagagaaagaacttgtgaacttgcaaactgaaatcaatacagataataacctctcacacagaaaaggttgggatgtctctgtttatttcataaatattcttgtggattagacatactcctcggtaaatgcttcatgctttctttgtgcttcttccttctttttctgtttctcctccactatacctcattttcttgcttggtttttctgtctcccacacagaaaattcatgttggatttcatattattacttgacccaataaagtcactgaaacagacacagaaggagtcaggaacccatttatttcacagtgtgatagatcaatattcagaagagagcaataatagcgtatatgaaatacatttttttcaagtgtgctcattaaatgaaagatttccctcctaagaatatcctgtttagggttttgtaaaatagtattatgtgaactttatctagagggatatttgtaaacatttaaaaaactcactgctctcctagagcataattcactataaactgcgcttttaagaaaccattcaaaaaaattgggtaacggaatacatttctttgactcaccctgtgtctatattagagtgagactatattcttaaatagaagacatatttaactactataaatgttctgtataaattatgactttgcttaagataagacacaaaagaaaccttaatgcttcttcctttatggcctaaaccataaagaacataaaatctattctgacaattttattagccacatatttttccttctatcaaactaaatagttgtattaaatctacacagaatctaaatgtttatgtgttaacttactcagccttttctgcatctgttttaattcctagggcattttctccacatggtaatcagagaagtactgtttccagaaaataatggaaacttcagaattaactgatttgcactttctaatgggcatggatggggatagtgactaattagcagtgtgatccatcattctaagcaattctacctcaagaacagtgatatctgatcaccccagtctatcagagaagtagagaagttctaaacgtgttgctaattaccctgatgaattagtggatggaatctccccctccccgtgtttcatattttcttggtattatgatagagcaatgctggtgatcatgagtggcttttagaaggagtggaaatttattacatagccagttttgatatgcaaaacaattcaattagggcaaataaattctccaacatttcatactatgtaggagacaatgataattgtattgttgggttctccatctgtacaactattagtattactacaaaatgtttaaccacctgtgacccattaattggacagtgctacacaatatgcttttctttatttaaaactataattttaacataatttaaaaattttatgaatatagagatcatcttcagtttctttaaaataatgctggttatattattatcagaaggttgaatattaaaccagaagatacaaaatcttttctttttgaccttttctcttaaccaccatttagatttaatttctgcatttcattttcactctcattgtcacaagttttatttggcttattgttatgagtctcaggttaaattaattacgcctatgagttctaattttcacatgcctttaattaaatgtgttttaatggtagtaccataaatttattttattttttcattaacatatagaaaataatttctatttgtggccttaagtacaatgtgaaaccaaaaataagtctgcactaaacatgagatatgtatatctttgattgtagtttattttatgaaaggcttttcaatgtttagcatcgctgtttatatccatgattgtcccaaaggttggatccaaagtttatggggcaagagtgggggtggggctggtcatgaatggctccttacattcattgtcagtaatagtagtagatgctttctgttgtataaatttgaaagtattcaaatctattctcagtttaccctatcaatatgtaaaatatcaagaacttttttatgtttctttagttttagggataaaacatactttcttttatatttatttagaactccaatttgtggcatgaagggaaaaatgcttcaatgtgaatttgtgccagctgactaacatgagaattgtattacttataattaaacaaattactagtgaaatatagtttcattaatttttcttatagtagaaaccaaatgcaggataaatataaatatttaaaatattgacatgcaaaagagagaattctgcaaggcaataaagtaaggcatgtgaaagttgcaagtatcaaaaaatatctatatgattataaatgaaaagaatcaattaaaggggttactttttcccatgatgtaatgggaaagcttgcagagaaaaaggaaaacttaaaagagaaaaacatacatgataaaagacggtgtgtaccgggtgttttcatctagtgaattataaagcgtactaatacaatctaatgcaggaacagaaaaccaaacatggcatgttctcacttgtaagtgggagctgaacgatgagaacacatggacacatggaggggagcaacacacactggggcctattgcggcagaggggaaggagagcatcaggaagaatagctaatggatgttgggcttagtatctaggtgataggatgatctgtgcagcaaatcaccatggcacatgtttacctaggtaacaaacctgcatatcctgcacacataccttgaaacttcaactaagagttgaagagaaaaaaaaataaagtttgctaattatcaagtaattgttttcagctccaaatttttattttgtactgtttatcatgcagaagcagggctctgcaaaccacatttctactttgcttacagattttccattagtttctgccaagggggagcagtagaagccagaaaagctggaagaggaagaagggaattgtcgcttcctgtttgcttcttgtagacttccatttggtgtgtccttcttgtaaacttcactccagcaatgcttactcaccctggaagtagcagttcctttctacaatatcagctgagtctactttgcagctttcccaacccttgtagaatcacctttatctactctcctcagaaacaacaccaccagctgagaaagcagaattctttcctcaaaggccagagtctcagctccgtggagaccctcctcttagttctttagtgggggactggaatgggaactgttttctgaagttgtcacacctgtgacactttagtctctcctacctttcagtcacctagctagccactgtatagctaggaaaaaaattgtttaaatttgctttgtttcaaaaattggtcttattttggtctcccaactggaccctgactgatataaaacctagagctctaagctcttttcagcaattatttttatttgataactttgaaatatagtgttcattattcaaattggagatctttttctatcatatttggatatgatcttttccatcatattttacttctccctatgaccgccttaccaggttcaaccctacttgtcttttaggaattaactgaaatgatgatccctttccaatatgttctattaacccccattcactcttggccattaatgaccaagataagtctacagttagctgccctgatacccagtgaacacttgttacatttattatgttgttcataggtacctgttcacttgtctcttttctactacacagtaagctctctaaagaactgaaccaacttttattcactggaacttgaatgttcatttgcactgctgctacatactagttgcttgataaataattattgcatgaataaataaatgaaaatttcaagaatgagtctttttttcagaattataattgccagatttaacaaacaaaaatataggactcccagttaaatttgagtttcagtaaaacaatgaataatctatttagtataaatacatcctaaatatttcattgctaaaataaaatttttaaatctggaattcaaattgcactgggtgtctgtatttatctagcaactcttgtctgaaaaaattcttccaagactgacttgattgaatgaattgtgggaaaaatgttttaatgctcatatagaagcatcaagaatgcttcatatacatttgtgccaactatgaaaatcaaaagactatgttttactgtgttatttgatggattgaccactccaattgctgtaataggtagacctgatgccctagattcaagataaatgtttttccagcaacagtggaacatactttatctcccagcagggcttgtctggatgtctattgacaggcctcgtagtgtgactcagctaggcaaataccagcctgaaggtcactctttgaaaattataccatgctgggcacatccaataatgtcaatctttcctggacctagtcttgaggtttgcggtcttgaaatataaatgtcccaagcacagattttgacagctagtaattgtttaataaatgatgacttcctttctcaatacatttgaatccatttcagaagaaaaaaaataagaaagaaaagattgtttaggaaaaacttctgggcctggaagtttagcattttaacatcacgtcctctgcaattgacctaagatttaggagttacggtagtttaatgggatatagaagcacacgcaattttacttaaaacaaaaaattggctctctgggagccttaagaaagaaacttttgacatgtcaacctgaaaacattaaaggagtcagaatcccgttttaaagagtttattcaagtgaaaagctggaaatggtcattccagaatgcatgatctccagagaaatagggtcagtgctctaaagttaaaagctaagttcttgcttatatagtaaggagacaaagacacctaacaggattataacattttcaatacaaagttggtttacagagttacaacaaattagttagttaccgtgtgttttctgtgcagtttgttttccttatagctggttttcatttcctttcctaagaggaaggttaatctataatgaaagtcaaccgtggagagagaaggggtctttcttggttctgtcgggcccttcacaacatttgacaaaacaaagcagataagggaaaaagcttaatctgtaatcaaaaggttgcagctggctaggttacaagctgcttgtcacatgactgaggctccataattgacattcttttaaggctcaaaataatttagagttccaacaggttagattttgaattactcttttttacatttttttttattaaacttgttttaattagggacctgggtatttgttaaataaagaatgtcttgtgaagtttaaaatgttgagacttattatgatgattattaatgtgttctagtttcaagttttatggattgagaacttggatgaatggagaaaccattgagtgagatgggggaaaagtgtagatgtaacatattttgacaaggagtggggttgagaaaagattaggagtttagttctgaaccttgtccttgcaagtctttcagacattcaaaaactgtcaagcaggccgttgaaaaatgaatctggaattcattagagaagtgtggagtcctgacaagataagcaacaatgaggaaggggccccaggtgggggagaacaattattctgagagacagctaatcacagacaacctgctggcataacatcctgttcccaaatacctcattctgcaggcagtaacagcagcacaactttatctgcgcatagtccctccagcacaaccctctaaaacttccctccagcccctgcctcttggtagacaatcccttctctgctgcgctacccattgtattcttgcaccatgtgtctttgtacttcctctaataaacctgcctttatttacctatgattgtcttggtaaattcttttaccaactaccatgctggccccagccacttacctccaccgtagtgattgctagagttacatttggtaactatttctatataggggttacttaaagccataagacttgctaagaaccccaaagaagagaggtagatacaaaaaagatgatggggtccaggacccattgtgagctctgagtcactcactcaaacttttttttttttgagacagagtctcactctgtagcctaagctggagtgcagtggctcgatcttggctcactgcaagctccgcctcctgggttcatgccattctcctgccccagcctcccgagtagctggtactacaggtgcccgccaccacacccggctaattttttgtatttttagtacagacggggtttcaccaagttagtcaggatggtcttgatctcctgaccttgtgatctacccgccttggcctcccaaagtgctgggattacaggcatgagccactgcgcccagccaaactttaaagctaggagagaaaaggaaaacacaacaaatgtaactgagtgtgacataatcggaagtaaatattcgatctctgtttttttggcacaaagctcctaaaatccttggaatcttcaaactaatgagtgtggggttttttgtttgttttgttttttttttgttttgtttgtttgtttgttttggcatactgatgagataactgatggctggtgtgttcctgtatagcctcaggatgggtgctggttgtcagggaaattcaaccaagtgatttgagggttagaactttcgttgccacaatcctgacctccaggtaggtcactaatgaccaacaattttatcaatcatttctcagtgtatgaagcctccatataaccccaaaaggatagggtttggagagcaaccaggttactgaacacatgtaagtgacaggagggtggcacatccagagagggtatggaagctctgtatcctttctcccataccttaccctagtcttctcagtcatcttgctgtttatgtgcattacttataatattctttaaaaaaacaggtcaatataagtaaaacactttttctattaatatctgttgggaaaaacttgaatgttggggagaagctgaggcagggtttccatgtctgacataatgtagaatagtcttggaacatgtccggggtccagggtctaaaaccctttgtggcctttgcaacatcaagctctgtgctaaagggtggaaggctaccctgacacaccataatctaagcccagggcataaaattccttgtggcttggatagaatccagggctcgtggctctggaatgtgtctagacttgctggctccttgctccttgctctcccaggatcaattgtatcttgagttaaaagaacctgctctccattttctcaagcagcagagcaaacgctaaaccatgacagctataaatcatgtgcttaatgcaagatgacctccacattctcaccacctgtttctttgttggattaccaataaatagcgtggggtcccacagctcaggaccttcacagcctccatgattgcagtgggcccctggtgtcccacctttctctctcaaactgtctttttctcaatcctttgactccgctggactttgtcacccccacgacctggtgttgggtctgttcaccccaacaataccctttatctgttgcaggatccaatcccagttcccacattgcatttagttgtactgcctccttagcctcctctgacttatgatagtttttccatctttccttatttttcatgaccttgagagttttgtgacatattttggtatgcgttttgtagtatgtcccttaaatgaggtatgtctgatgctttcctcatagaacctagactcttaaattctagaataccacaatttttttttctcattatctcacgttgtttctcagtagttagaagttaaggaaataaaaaatatttttccccaaaatatattcctttgatatatttttaaatgaccagaagattggagtggctctgaaaagctgtcttttgcagaggaaaattatatctgtagagaatcttcattaatgcacccaggctttccctttctttccccaatctagaagaaattaattgagagtttgacactgtattggttcattttcacactgctggtaaagacatagttgagcctaggcaatttacaaaagaaagaggtttaatggacttacagctccacgtggttggggaagcctcacaatcatggtcgaaggcaaggaggagcaagtcatgtcttacatgggtggcagcaggcaaagagaaaatgatgatgtagggaagtttaagtttttcccctggagattcaataatttgtgtctataaaacttactcataatagatagattaacagaaaaaaaggtataaaaattttaattacatgtaacttgtgcaccagagtaatacaaaatataaaaactcaaagaagggcaacaattttaaacttttttttttttttttttttgcagatccttgctgcgttgccagggctggagtgcagtgtcataatcacagctcactgcagcctctacttcctaggctcaagcaattctgccacctcagtggccaagtagctggaaccacaggcatgtaccaccatgctcagataactttgtctttttttgtgtgtgtgtgtggagacaggggtctcactgtgttgcctaagctggtcttgaactcataggctcctcctccctcaacctccccaagtgctgggtttacagaaagattaagggcttggaatccccacaaagcaggatatggttgggggaaaagaggagaaaagacatgttatacagatgaaacctcacaaatagcagttcttagagacaatagatagtaacctctggtcaatgtttctaggttagaacttaaaagtgtccaactctcaatctttcctataccctgtcaagagggtctttggagacaaactgtatgcatgtgttgtttacttcatttatttcctctacagatgcaaatatcacccccccccccaaaaaaaagaaatacacacacgaaaagagagctttgcaggtctatttttgtctgtaacccctctgaacagccttttcaaaaaatatgttaaataagtatattttgacttaaaatattttcatttccttcaattaacctgaggaggggttcctggtaaaccctaatttagagctattatgtcagaaattccagaagtccatattggtatctaaagtggggtgccacagtcttgtgggactgagcccttaacctgtgggatgggagtctaactccagttagagtcagaattgaactatagaacatctagtttgtgtccactagagaattgacatgtgggaaaaactccatacatctaacattaggagtgaaatatccaggactattgagagtgtagcaggagaaaggagtcaaagtttgttcagtttagttctttccctgctgtaggggttgagacccttggtgttattggtgagacaagttattggaggaagaaaggaagaggcttggttagcaaaggtggtcagatgtatacgtgaaatctcatgggtagcaggcctcagagacaatagatggtaagtgttcctgttcagatctttaatggagcctgatatggtttggctgtgtccccacccaaatctcatcttgaattgtaactcccacaattcccacatgtaatgggaggaaactggtaggaggtatttgaattatggggtggatctttcacatgctgttctcatgatagtgaataagtctcttgagatctgatggtgctaaaaatgggagtttcccctacacaagctctctctttgcctgctgccatccatgtaagacatgacttgctccttcttgccttccgccacgattgtgaggcttcccctaccacgtggagctataagtccattaaacctctttcttttgtaaattgcctagtctcaagtatgtctttatcagcagtgtgaaaatgagctaatacagtgtcagactctcaattaatttcttctagattggggaaagaacgggaaagcttgggtgcattaataaagattctctacagctacaatttttctctccaaaagacagcttttcagagccactccaatcttctggtcatttaaaaatatatcaaaggaatatattttggggaaaaatatttttatttctttaacttctaactactgagaaactaagtgagataatgagaaaaaaactgtggtattctagaatttaagagtctaggttctatgaggaaagcatcagacatacctcatttaagggacatactacaaaatgcataccaaaatatgtctcaaaactctcaaggtcatgaaaaataaggaaagatggaaaaactatcataagtcagaggaggctaaggaggcagtacaactaaatgcaatgtgggaactgggattggatcctgcaacagataaaggacattaacagaaaaagtggtgaaatctgaatacattcaaatatttactttttaaaaatattaaatatcagtagcataattaagaatttcatataatgttacgtttactctaaagctgcttccttgtaagtttggcctacaggtttctctgtaaatagagaactgtaacctaactggatatgtaaacagtctgtaatctactcttttaacacatggcttggtctcagccaatgacagaagctatgtttcaaccactcacagccagccaactgtccaaataaggcaaacaccaagctgctaccaattcagctgtttctgtacctcacttccattttctgggagtcactttccttttctaactgtaaatcctctccaaccacacggcaatgccagagtctgtctaaacctgttctggtttgggagggctgcctgattcgaatcatgtttttgcccaattaaactctgtgaaatttaatttgcctatgttttttctttcaacaatactaaattgttgatctgagtctgtcagttcttaatttcttgtgggaatgtcactggcttccactaattataagagtgtttatgtagagcatggctgtactacttggtaagcatcaaataaagactgtgccaaatgctttaacaatggcttgggacaaaggtctttgttctattttgaaccttaataatcagttgtagaaacataaacatatcccatggctctcactgtcaacccagatgtgtacttgctttctctctgtgtttttaattagttttaattgccctaaagtgatcatagaagtgatgaaagtgtaaatattttactggatttcaattttacatctaattacacctccgatgactcttacatacatatagcgtacctagggctctgggtgattaaaagttatcgcttgattacatcgagaaaaattacaaactggcctacagcttcacatagcaatgcagcacgttcactctaatatttagaaatcatagacatttaaaagtcacatgcattacaactgaatttgatgtacttgttcttatagagataatctatgtatgaataaaacaaaaagtgtattatctgtgtttgtgtgtttacctttttttttgcagaattatgtgcaaaatgctccagtgaaccttttcactttacttttctacagatttattttttatgatagtattctattaaacagttataaatctttccttctttggcttggatatggttggctactcgttgccaatcacatgtcaagagcaggcagtgtggttcaaagaagcagtcaagaggcaagagattcaaatatatgtaagttcaatctggtgtttactaagaactcgagaccagagaaaaagattgtgcgctgtctctctctctctctctctctcacacacacacacacacacacacacacacacattttcctatgcaaattatcatattcacaaaacctggataaaacaacttcaggatataattttttccctctaacttatgtaaatcttgaaatgcattgacatttgagagtatgaaagcaatagctgttttaaaagagagtgcagaagtctccctgtgattgaaactgtcctgttggaaagcaacaagaggacagaataaatgagtctgagaaattttgttgtgttttgttttcaaaactctaaagggtaaaccaaattttgttattgtaaactaggcttatattagaacattctactctatgaggatgttgtctaaatttcctaacttcactccatctgttgagtaatcattttatttgttaagaaactttatttattcatattttaaaatgcacagatggcaaaaatgtgactctgcctgctgttgtacctaccatatattcagcaggaagtctccttttctcaatgtattcaaatattggtgtttaattttttgtatatatgttcacacctactggctagacatccatgttaaaagtattttgcactgtgaagcaaaggatgtatataaagcagtcccaagcatgttggctgccaagatgatctaatttctttgatggactcttaaaggcacctggattgccaaaattggtgtaaaataaaaaagacaggtagaaagcaatctgtggcaaaataaggtttacaaggaacataaaaaagcaattcaaagttagaacacagttaaaaggaaaatagcccaattccacgctaccttatttcaaactgcattcttgcatctgttgcttgttagaaaataaaacaatctatagttagtcctttagaaaggtgtgaatcaaatgaatgtgtactttagtggagccgtgatacttgttaatcgcaaaaattaaacagattataataatgtttgcaataaaaataaaaatattaattttccataataccattctagcacacagagtattttggtaaattttcatttttgtttaagaaatgacaaacagaattgtctcaacaaatttgcctaaaatctgaaaggaagaaaacacatctaagtctttgtattaaatatgggttaagtgctaagggaatgtattaacttaaaaaaaaaaaaagtcaagcttttaaaaattttaaaaccgtatatagaaattgtcagatcagaacaattactacatagtacaaaaataaaataatgtccatgcatacaaacaagtttaaattttaattttcttgcataaatacattaaattataatatttagtctgctggtactttaagaacgtggaagggatcattgtgctaactattcaagccacttatctcttttacccatgctgagtataaaaccagcttagacaacaatcttagacaacactcttcattagcggtaaagcatattcgttaatgcaactggatgttttcctgcataaaagaaggttaagatgttttcttggttgtaggacatttagattgacaacagatttgctattatattaaattaagtggctaatttatccaagtgaattatctgcatagatagccactggagcttaagtagtaaattcagacacagttataacagtcaccaggtgagatcattggatgtggtgttaactacttatttttgccattctgttatgttttatgtgtgactatattacaactattacgagtgactttggaaataaattcattttaattacaatgtttgctctcccagaatccttaaacatttttttcaagtatggtatgtttgcaggtatggtttacataacgatttcactgattaattgaacaagagatgtgcatcagctttcattatttcctactattaaatggttgaaaaatatagataggtaggtaggtaaatagattagatagatagatagatagatagatagatagatagatagagtatatgcaactttaatccacgttatactgtgatctgatttgttccttttaaaacatcgttatatttatcagggtacacagcctttccttacttgagtgttctctttactggaacaacctagacttacatacagaaatgtttcagtgctcaataaaaatattaattatctccaataccatcctagcacacagagtattttggtaaactgttgaaaggaatctgtttcagtgttcagagaatagccaaaaatatggggaattctctctatccctgatgacatcatgaactacctttgcaaaaattatgacagtgagagaagtctgacatagctggctccatcttgcctctaacctccaagctgtccttgttcattcctgagcataggccaagctagctatgggagaaatttagtttataggttaactttaaagcaaagatgataaaagattctgtccaagactgaccctctccttgcctggagaccaaaactgcctttgtaaaactaacaaattagccacaaggttaagattatgtatcaggagtcatgtaaccagaggtcacgtggattgtaacctccccaattgctcccataaataacatcattattgtaaaatctaagattagtatttgaggtatttttcggaccctgcattctgatggaccaggtagcaccaccgcgaccagtaatccatccaagaaactggctcatctggtcttgtgaccctcacccaggctaagcacaagaagaaagcttcaaccccctatgatttcatccctggcccaaccaatcagcattgctcctttcctggcctccttccccaaaaactctgagcttttggggaagcagatttgagaaatgtctcctgtcctgtcactcgtctggccctgcaattattaaacttcttctcttctgcaatcttgctgtctcagtgaattggttttatctgtgcagtaaagaagaacctgttggatgattacgatgaaactttagtatgtgagtgtgttttatttcaatcctgactaatttaacgattgcatttgactcttattgtgtgagatgcacagacttctcattctgtacttgccttagtttcatctcctataggatggaaataaaattcaccagaaaaaagctaccctaaaggcagagtatcatgatcaaaaagtatctacaacagagtggaaactaaataaacattacttattattaaattaatatttttatagctaccttggcatattggaaaattcttttctccactcattaaggactatcctgaatctttacttgaataagattaaataaacttgatctaaacttttacagcctctgtttttttcattttaggaaggataaagtgtaagcccaggtttggatagaaacaacagaaataaaataaaaatgtaaacactgcctgttgtaaattatctgattttttttaggctataaataaagtcaacattgataaatttcaatgtaattatagtttctttcttaatcttaggtctggtgttgaattatcaaatcattacttttgtaaagactgtctgaaggtaaaagatagtaagattaaagggtattaaatattcttgtgcctcatactccaagaagatgaggccatcaatcttttaatcaagtttataattgcatcttatttctggtttagtcatctttgttaggaattcatgttttacctttcatagtttactggcttctttactctagaatgttatcatctctcttttctctaaataattttaaggaaataattctgtccctgacgtacccttgttaatattgctttcccccatctctaatgaagtaacttgcatatttgcctgtttataaactaaatactctccattcaatcagatttgaatatattcatttagagttttatttgtgttttaattctctataataaactaatttccactctgcaattaatctagcactttaagtcactaaacatatctctgaatatcggtaaattttggcaatatgggagcattttaaaatttatcattttatgcaaaatgtaattgttaattaaatagaagtagagatgaaaacaatatgtattttatttaaaagtatgtttggacacacacacatacacacacatacacaatcaagagaagcttaaccaagtatgtatcatataggttataaatatttgtaaattctaaggttttactggttaaaatacagtagcccttctcagtgatttactggctatatggaagaaaggcacaacattcacacatctatagtaatgcctgttttgggaatgggactaagcacaacagatagggggagtgtctctcattctccatggaacctctgggttggtttccatatggcataaatacgtaattgaactcatcttcgtttgccttacacctgttaataaagtctttgacacctcagggaaaattgaagtattggtattttattctttggaaattaatttcttattcatttagggcagacataatcttggcacatctaatcttgctggtgtactcaactaaatagagttcaatggttaaaagtttttcatagccgaattacatgttcattcaataaggagtgtttcattgcagagcacatggttatgagtagcaagtatggggtaaaagcaaagggaaatctgcattgtgtgtgcttattcctgtgttgagtattcttacagagaatgctctattatggtgtcttttctctgattaggaagcctgttttttcagttcaaaagccccctgtgatttgagagtgcaaggaaagcatacactggtgaagtgacttgccagaccattgaagttgaatttaagcatgcaaggcaacactggagagagtggagctgctctagtctgcaaagatatctatatgctctgagctggtaggaggtacagtgaagtgatggcagaaccatggggtagctttgattcacaataagatactgcctcttttagaatgaaaagccacctgttgtttgtcaaaaggtactacttactgattattgctttacatactaatgcaaagaactcttggaggtagtctcttgtgcagatgctgaaagtcagtctttcacctgtctccagtaggttaaacttaacaaaaaaaaatgttttgtacagcaagtagagaatgcttctttctttaaagaaatcagagccttctgctgggggcaatgaaggggtgaggctacagggagtactgagttgcttaatgccaagcacagaaaaatgctaataagactcatgctgagaaaagctctcactcatcagggtgcatcattgcagacattaagctgagactgtgaattgctattagccaaaactggagaaagactaacgagaatagtgccagaaaatacttcgtggcactgtttgaattgctgtctgaggcaggaggtttgttgtattgtttttgaaatgatttgcttagcaaaaattacctggttactaggtaaatctatcagtatatgatcgaggaacacttatattaacgtcatttactgataaataagaaatactaaataacaattacatgatgtgtttaataatcaaatgtataaattgcaagcacattatttatatgcataatactctagtgtttgttgtatgagacttgaatctcaattaaatgatgttaatatgagaccataaaaagtctgaaaagaggcattcactgtcttttcaaaataaattttatatgagaacataaagaaaacccatctcttccctcattttttgccagtatggcaacaaatagcctgcataactgaggcaatttgcaaactggtagaccctctatcattgtgttttatgagaaaaaaaaaagataatagcagagtatgcaccaattcagaattaactggattgaatgctgataattgtatgattctttttattcttaccctgttgtttggcttatgcatctctgttcaagtccatgtggaagacagcttgaggtgcatgatcaataaaatgttggaggacattgaacacagtagatttcctggtgatgtttaagagggaggagttaaggtgtgctaatgagcatagttcatgttaattgccagcacctattggaattatctgttagaaatataaaactattttcccttgctttatctataaaagatcctgacttaaacatgccttccagtgcagccaagtagaaattcataaagagaattatgatttttttaaataaatgaaatttatttaaaattccacaattcattaaaatctcagatctataataatttatgtaccctatgtatatacagggatttaactttctccctcaccaatttgacagttcagaaattgaaagaacactctaagatttgtatatgtgtatgtgtgtgcaaaatagtgctctgaaacagtcctgtctgggaaaattttctgataaccaatattagattttctagttctcagttatatctcttccctctatattgttctgtaaactaaaaactatctaagacaggtctcaatcaatttagaagtttattttgctaaggctaaggatttcccctgaagaaataaagatggaatcacataaacagtctgtggtctgtgcctttctccaaagataactttgagggcttcaatatttaaaggagaaaagtgagctgaaggggaaagagagagggcataataatccacatattgcaagagaaaagaagcagataagggaagagtcaattatgtattcttctggcactcagtagagcagcattttacacaaaataaggtgaacatacagtagctatctgtggacatatttaacattttatctgtagctatctgcttaggaataaaaggaaaagcagcttcttgcatgacgcaaccatcagcttaattttttcttttggcatggtgaactggggtcccaagttttattttccttttacattccatatcaattgagaaaacttaagagtcagatcagaagtggttttgttcacataggtaatggaaaattttccctccaccctccaagcatttgataatagggttgctgaaataaactgagtaggcagacaagaaaatttatcatgtatatgggggcattacatgaaagaaaaccaaataccccaaactgaatatgatctagaagcttaaatacctacttcctaagagaaaaagagatgggaatatgtaaacaagtaaggagaaagcaaataattttgaagaaagatgagtaggccctcagaataataggtaacagcctgtgacatagtttgtctgggagtattgttgactcccggtactttttttcctgggatagaagtcaatcttcctgggttattgtattagtccgttctcatgctgcaaataaagtcatacccgagaccatgtaatttacttaaaaaaaaaaagaggcttaatggattcacagtcccacatgttcgctggggaggcctcacaattacggtggaaggcaaattgggagcaaaggcacgtcttaacatggcagcaggcaagagagtctgcaggggaactgccctttataaaaccatcagaactcatgagacctattcagtatcacaagaaaagcatgggaaaaacccacccccatgattcaattacctcccaccaggtccctcccagaacacggggagattatgggagctacaattcaagatgagatttgggtgaggacacagccaaaccatatcacttataaaattcctggagaggagattgatgataattgagttccctttggaggatctgttcctaggcagacaaaggaagttcagagaaagcccctttctgaatttgcttttcttcaaatgccatcagtttgaaataatcagcataccaaagctggataattttgggtaacatttcctgaactacttcatccagaagaaaattttaacttcaatttcccacctaaattaacttacccaccacaaactattgatatatatatatatactcctaaaagaacaatttcaccgggcacatgctgaaaaccacaaggtagtctttacagtcaagaccgttgcaattaacagtcaggactagtgcagtagcgagaaaggttgaactcagacctgaaaaataggtggctgaaagagaaagtaagaggatttttaaaggttaagataagctggtagagaaatactgacgatattcagggggagggtggttaatgtgattaagtgctctgtgtttggtaattgctgtctacctaagttagtctcctaacctcccacagggactgggaaacagagtccctgtctttcttgatgttacatttcaatggatcccacttcaatgtgaaagacattcttggattgtagaattaaatcttaaagaccagagaaatattttacaactgcatattttctaaagtaaacactcaaaggaaaagggagatcttttcaagagcctagttaagccaagaggagtcttaaagctgtcttggtctgatgcaggtgaagtggaaagaatatgggcacatacacacagaacacagaccacagacagccgatcttggtaagacatacacatacacacagaacacagaccacagacagccagtcttgataaggaggcaacaatcgtgatatttgggctccttctgtcgagtctattagctcacgaaggccattcttactcttacagagaagaaagcaaagtaatatgagtggaaagaaagatcagaaatgttctgtgcaaaactgtttccatttggagaatatgcaaagtccctatcaccttaaaaagacaagaaaacatgggtattattacttacttgtaattctagaccacaatcaaagaaggtggtactagaacttgttcagggaaagcatctgtatcctaagagaatctctataaattggcgagtgagtcatctaatgtcactccagattgattttatgactattatacaaccctaacacgctgcaaaatgcaatttatgttctcttgttgcccaataatttaacatcactttcttaaaaaattatcaatagaatatctgatattatttatttatttatttatttttgagatggagtctcactctgtcacccaggctacagtgtagtggcacgatctcggctgactgcaacctccgcctcccaggttcaagtgattctcttgcctcagcctcccaagtagctgggattacaggtgcccaccaccatacctggctaatttttgtatttttagtagagacagggtttcaccatattgcccaggcatgtcttgaactcctgatgtcaagtgatccacccacctcatcctcccaaagtgctgggaatacaggtgtgagctaccattcctagccgaaatttctaatataacttatttatggtcagataatatacttgatttcagttcttttaagtacattgagtctcattttattacaaataatatagtttatcttggtaaatcttccatgtgcccttgaaaagaatgtatattctgctgctattatgtgtaatatttcagaaaaatcaattaggtcaatataggtgatagtgtgtaacaagttatataatctgtattgattttctttttatttgatttattagtcattgagaggggaatactgaaatatccaactataattgtggatttctctctttttccattgaaatctaccagtttttgcttcatatatttcaaaactctattaaaaggtgcatttacatttagaattgtgatatcttcttcaagaattgacacctttattattataatattaatctttttgtctgtgataatattcattcttccgaaatctattttctttgatattagtatatccactctgatttttttgatgtttgcgtactatatctttttcaaggttttaactttaactaacattgtcttcatattttaaagtaggtttctcttaaacagtatttagttgggttgtacttaaaaaaaaactccaatttgacagtttatacctgttaatgaaagtttttagatcatttttatatagaatataaaatcagataaggttgatttaaattggacatcttactatatgttttctttttgttctatttgttctttcattatatttttctttttctgcttttggattaatagaataatttttatgattttattttatctcccttattgggctttgtttaatagctatattatattccttttatactgttcaccatagtgtttataatatacatttataacttctcagtgtatttcaaaataatattataccactccaagcataaaaatcttataatagtataactccatccccacccatgttcccaagctttatgctatttttttcagttacattacttctgcatatgttattatttttgccttcaatgtcaataatatcttacagaattataaatgtctgtcatttatatggacttcaatatttacctttccattttcctttaatcatttgtgtattaattgcattgtttttgatgactagtctgctgttttttcagttttattttacttattttactcttgctgcacttaagattgtctagcaccctttcacagtgatttggttatcgtgtatttgtgaggttcttcatgttttttgtacttgaagtttagtgagcttcttggatctgaaggcatatagttgtcatcaaattattgacagctatgtttttatttttttcccgcattccatctctttctttcagtacactagttatagttacattattctgcctgatgttgtcttatagaccacttattctcttttcattcatcttttccttctgtccttttttcccctctaagttgcattttggatgatttccacatcttcaaactcactcatcttttcttctaaattttctaatctgctgttaatctcatccaatgcatttttcatcttagatattgtatttcttctagaaatttacttgagtctttattatactttcattttcttttttaccaaacccatgttttactccacttttttgaacatatgagatctaacaaaagagctggcttaacatccttggctataattatattatctttcatatttatatatttgtattgatttcttcacctcattgtgaatcatatttttcttctttgtacacctggtcattttaattgtgtactgaactcttttgtacacatttgaatatgttggtcttttttccctagaacacagttacatttcttggaactcttttatcaattggagtcttgcttttgaccttaggctttattaggtaggggagagtgacctttaattttagctaatttgtccccattactggaagaaaatatttctgagggcgcaactggctaacctgtattaggagatctttctagttgtgtgtggatttcaaatatttttataccttcacatttatggtgcttcttacagtgccttttatgtagccaaagactcaagggaaacttctgcaagagctaagacttcttcctgtatatgtaaccctctcctctcagatactctgcctacctgtatacgaatctctttctcctcaactcagaagattcccatattttcttctagttctccttcctgggttgtggctgagaaattctccatgcagtgtactgggcacttgctatgctcacttagttcatttcctctcctttaggagatggctgtcctcaactgtctgttgcccaagggctgaaattagttttctcatacattttgtacatcgtgttaattgtttaatgtaggagaataaatcttgttcctgttactttttcatgactctagatcttatctttagagttttccatagcatgtctgaaagtatgtagaagaaagagtatccaaaccacagtttgatcaaagtgaatctaacaggagcaaaaaaggtttgttcttattatacattttccttataacctgatttagcactatgaccatatttgaaatatacaagaaaaattaattacactttgtttcttagaatactttgagaaacattaggcattcatttgggggtgatattgtagcataaactttagaaacattacctaataaacctcattgttgaaaagtcatcataagcatttagatatttgccatctgtatgaccttgaatacgttgcttaatctctctatatctcagtttgcttacttttttttttttttttttttttttgagacggagtctcgctctgtcacccaggctggagtgcagtggcgcgatctcggctcactgcaagctccgcctcctgggttcacgccattctcctgcctcagcctcccgagtagctgggactataggcgcccgctgccacgcccggctaatttttttgtatttttagttgagaccgggtttcactgtgctcgccacgatggtctccatctcctgacctcctgatccgcctgcctcggactcccaaagtgttgggattacaggcatgagccaccgcgcccggccagtttgcttaccttttaaatagcaatggtaatagcatttccctcatcacattgttttaaacattaaatgatttcataaatataaagagcttgtaactgtaaatagcactgagttatataccgtgttagcaatgtttagcagtctgacaagtcctgaagttaaactcacaaaaacatacacaacttcttttgattatttaaaaaataaaacacatttatgtatgaagagggaacatacattgtcaattttctttagaacaatttaattttagaagcttctatataaacaaagaaagactacatattcttcagatttttctccataaatattacttttcacagctacttttttggtatgtattgattaatgtatttattctcagtgagatacctgttacagattctctgaaagcctatacaggttttcagaatttcagatctcattcttacagctatttgcaactgcatgtttagtggtaacttggtagatggatttgtcttagggtagacacatttggtaaagcttcatttctctctgtccataaaaatttccccccgaagaagagacagaatttaaatacccctactcctgattcaaagttaataccagtgcatctggtgcgtattccatgatctaaaataaatggaatagagccatgccagacacattgctagattgtatctccttagtatggtgaattttgctaggctttgaatattagaagaattcagaggtcacagtttgactatgtcaaggtatctctaattgaatagtcaagacaccagaaagcatatggaccaataggcttttgaatttgatttaggacaattccacaggagcttttgaatctgctgaagatcatctggagggatgattgagaaattcctgattaaaaagttcagtgaagacattctgctcctgggagatagaaataaagtgaagaactcatgaactataataacttcattccatcgtgactgggaataattcccactaactcccctgcatgagacctaaaatcacacataatattgcgttattgttttatgctggccactacagatgtcagtctagccagtgaacattttaagatataaaaaaaaaatctaactcaatttatattacttttttgcctgtttggtaagcaaaaagtggaaactcacatcctggccagatttgtcatctcttcacacagccttctgctcagagaaacatgtctaggattaaccaatattagaagagaggttagtatctgctgtcatttggatccatagataaggttctcaacaattatggattgaaaacaagagataagacagcctccaaagattcttgaactgatattttaaaataaaatttaaaaaattcttaatgtaactgcaagttagagaagaaaaggaccagctagagaagctaagtcatagtaattatggagtgtgagattttagatcatccaaactagtgtctatgtcaagttctgctttcctgtgctctgccctgagcatggttcttgctttccataaggaaagatttcacctttttcttagatgactacataaacttccatttttttagagtaattgaaccagcctgcttcagggaacaaaaatgtcttaattattaaaatatatctgtttgataccatccatatggctttatagcttccaaacatattttatttttactttagaccattgacataatagacatcatattattatatttctatttttcactttttttttttttgctctgtcaccctggttagagtgcagtggcacaatcatagctcactgcaacctcaaattcctgggctcaagcgatcctttctcctcctcctcccaaagagctaggtctataggtgtgcaccaccacacccagctaatttttttgtaatttttatagagacaaggtctcgctgtaatgccaaggctggtttcaaaatcctggcctggtactcccggcttcaagtgattctcctgcctcagcctccctaagtgcggacattacaggcatgaacctccactcctggtgtttcatcaatttttattccaacattaggattatttgggcatggtggtgatggttacataaatatctgactttgtcataattcatagatctgtacaaaactgaattaagttttactcagtgtaaattatacctaaataaaaatatgtatgactggaaacagtacacaggtaaccatcatcagcatcataataatcatcatcatcctcatcctaattctcctccagtgatagggtgaactgtggatggaggtatcagtgatgcaaaaatggcagaatactgatactttttgaggctggatgaagttgggtgatgaatggataaagaacatggaggttcattatagtcttggcttttatgtttaaaattttccataataaaaagtaaaaaataagaacacacacacacacacatacacaatagacaaaaatatgttgtcattgaatgaggacatatctaacctagaatgttgtcattcataagggtttgcttaccagtccctaaattgtttgttcacgctgtagttagaatgatcaaaaattcaccaacctcactttatatccctacgtggatacgacaatcctcttttttgggcaatggcacaaaaatcgctaagaaaagaagcaaactacttttacaggtgttaaagggggagaaaacagaacagtaacagaagagtgatagttcatgaatatttagaatctaaaattctgtgtttggggcctgattctatcgattaccagctgtgtgagattatcaaagtaatttaacctctctgaagcccagtttcatcagtaaaatgtcaatgatagcacttgctttataagattgttttaaggaacaattggaataatgtatgcaagagctatttgtaaaacttaaattatggttattattcattcctattttgtgtcttagaaacttttttgaatagaaatgcataaccgtaaactcactcacttattctgcaatttgtaaagaattcaaaatgttggaaagtggtatcgcttttatctagtattttttctttttgattttgtagtttacagacagcagcagtccattactaacatatctaaatgtgttaataaaatcattctgcatgctcagaacaaataacaatctgaattgaaaaataaattgttgaataaaatatggcagagaacgaagtattttataaaagtacatagctagcattgcccgtatcatcaatctatttgttttgctgagaatgcatgagaatagtttcctttatacaacatgcacatacatcattgattttgtaaactgtatttcttagtaaggaatagattatagacagctttgggggaggcagctatgatgttggaagacagattaatttagcatagcaacacctgggttgaggtcttcacttttctagttactctaagtatttgaccttgaatactcgtctacttctcacagcattaagtccttgatattcagaagaataactccaacccttgcttctgcaatggttctggtaaatattcattaaaactaatatatgtatctggtctgtaatatacttaactaaatttaataataactaaatgcattaataaaatattcattttgcttttgttctatgattgtgaaatttaaaattttctcctagttttaaaataatagaggtttttccttgaaaaaaattctgttaaatatgacatttgtctatattaacagagcatattttgacaaaccctaaaatgtattgtttgtaaagttaatatgcatgtataaagactttatatgtacgtactatatgtattaatatacagaattgtatatgaatggcagtggacttcttcttgtttttctgtctcttgtccatacattattatataccttcaaatgtaaacatagtcacttaaactacatgatattaaaaaaaaagtaaatatattcacattttctttgattgtataatcatctatttctttcaatcctgtatgactcatccaattacaatttataatctgagtattaaggttaaatataatttcatttcaaattaacacattagaaatgcacaaccaggtatactgcgtaatgtacttttaatcaataagccatgctggcaatatcaatagaagtatatacttttttggtaaatagtcctaaagacacaagatggcagtactagacttatgagttactggaaatatggtaacgcattcaaaaacttttaatgcgcttcccttgctttccttctcagtatttgtaatggagcttttatttctgtgcataaacattcacaagttttgtggatgtttttaaatgctattgagagtgtgctatttatttatttatgggtagccactgcatttagtaaaattcgcctttaaaacatcttagtttcctcatctatataatgatgatattggtccagatagcctttatggttctttcactactggatggccatataatttaataaatcagaaaaatgagaacctgtacatttcaaatgagcattgaataccttaacgaataaacttactcaaaatttgagataaaatggcagtggacttcttccttgttcagtggtagaagaaagatcaagggtgattattacttagccttcactaaatttggaatatttagtttaccctaaattttatgtaagatgctaatatatgtactaccattgaagattttaccattgtcgctgggcagtctgtgtcaagaaaagcatgatgcaccatcctgttttattgaaaactttcaagcaaaagatctgccatcttcccactttccatcctcaaataattatttacctctaattttgttggttttaaaggaattgaagattactttcttttccagagctagtatcttacccatttcagtttatttatttttgtttttcttctcaagaaatgtaggctcaggatttcccccatttctacatttttgtttatcttgatctgatttatcctctacctattatgtaacttatcaaactgctgtaggaaaatatttccacaatggtaccatggtcacattgcacgtggccacagaggccaggtagacaaagctcacatgcaatctgacccaaatctttgtggaataccccataatcctttcaggaacatggcaaaatagtcttgtaaagagttgtcacaaggctattactcattcacttcattgtctagttggagactgctatgaagtgttttctcctcagtctccctgattctggagagcaaacacaccttctgcttcaccctccttagggtacagctgtaggctataaaaccttttagttgcagatagaattggctgctccaagacagggtaatccaccaccaatgccatctatcatctgcaccttcccctttgatgtcaccttgtggacaaaggaaacagacactctagtgatcttgcttactttatgtataataatgtaatataataataataaaactcataaactctctcaatccatttgggctcattgtatttttactggccaggtctatggaactgtgataagccagcctagcaactgtggtattgtttgctctttagggacagcttgacaacttccaaatgtcatgtcaagaaatccaaacactttaaggactccatgagattttgtataacaaaaagtaaaaatttaataacatattgcaaagcaggtttacaggaacttgtaataatctcaggggaaggctctaaatgccttgtcaatactgtgcactggtatgaatccacttgcatgagggctgatgagacaacactcacacaacaagttaagtgaaaataattgtattactcatggataggcagaaaaggaaaatagagattaggatttatggcgatcctgtcctctaaggctgagaaagctgcccaggatggataaacttttggctccctatgttccatcttgtacctcagctgatagataccaaaagtactctgggccctgggttatctatgtgggagcacttgaatggctgggccaaggcattgcaagacatcctgttttaggagcaaagggaacagagcctacactgtttggtcaatttgttctcatttcagaatgttacattcccagcacattctacatacatattacttatgtatacttatataacatatatatacttatatgttatataacttataagttatatatacttatatgttatataacttataacttatatgttatataagtatatataagttatgtaagtatatatacttatatgttatataagtgtatatatgttatataagtatatataagtgatatatatgtagtatatacttatataagtatatatgagttatatatattactatcacttaataaacaaactaaatattatgcaaggtggtcttcatgcttgatgataaaaagggaatttctgtttctgaccaagatataggaaaaggagccaaatttatcaatttgcatgaaataacaccaaaataaccccttcataatatatcagacacatgacttcaaaagactagatatcaagcaacaaagaacaacgatacctgagaaacgaggactaaatgcttgtgtccccacaaatttatattttgaagcctaattcacaatgtgatgatatttagaaatggagcctttgaaagattaggtcataaggatggagtcctcatgaatgggattagtgcccttgctaaagaggcaccaagagctccttttcctcttctgccaagtgagggcaaagtgagaagatgatgtctataaatcaaaaagtgggccctcaccagacaccaaatcttcccattctccagaacactgagaaacaaatatttattgtttataagtaacccaagttatggtattttgttattgcaacccaaatggactgagacaaattgggagaaaataaaaatagataagctatttgattgtcccaaatgattgtcccagattacacacttgagagaatttccagggtatgacatgatgacttagtatgttttgtgctgctataacagaataccacagactgattaatttatacacaataaaaaaattttggttcacattctggaggctgggaggtccaagagcatggtgccagcatctggtgggggccttcatgacgcatcattcaatggcagaaaacagaaggccaaggccagacatcaacagagggccaaactctatttttttcaggaacccactttcacaataaataacccactcccattaacctattaaggagggcagagccttcattaccaaatccccttttaatggacctacctgtcaacactgttgcattgaggattaagtttccaacacatgaactttgggggacatccaaaccataacagataaggagcgggaaatgcaggtaaaaccccacagattctgtgagttgagaagatagagatcatattttgagaggaataaaacagttgaaggtcagaagacagagtaatacagagaagagactggcacagaaagagctcgctagagctatgcaaaggttgctcttcaagagtgcaacagagtacttactaatcagtgcatatgtgtgaagaaactatcagaagctaagaaaatagccattagaaaaaattaaacagtagatcatacttacccacggtgagaaacaatgtctgttcccaataaccagagtgacaaacctcatatattatgagtaatcaggcagagtagtcagaaatattttgccttaatactggcaagatagccctaaactacacactactctgatcctatgtagcaaattttaaaagctatatccaaatgggcaaaactggctacaaaaaaattagctgtatccaaagttcaaatagtaatataaaaatacctggaatgggaacattttacaaaatcttgcatccagtaaaaaattagcagtcatgaaaagaggctgaaaaatgcaacttatattaataaggaaaatcaagcaactgaagctaataaaaaactgacaagttaaaagtagaagaaaattattaaaatcagagccgggtctgatttgctactgagagttctctcttcctcttcttcttttctttcttttacatacctactgatttttccttttttccctccatctagcaatgctactttcatttcttattttactctcttccttgtgatttactttggtgaatattccgtatgttaaaaaagttgagaagagacataaaagtacaattaaggaagataaaatcaaaactaaattttatagtgataaaactgcaatgtctaagatgaaaggtgttctggatggatataatgcaagctctacgctgagaaataaagattaagaaacttgaaaacacaacattaaaataattccaactgaaatatacaaaaaataattataaaataaatatcagcaagctgtgtgaaaatttcaaggggctaatatgcttgtaattagattcactgaaggagagaagtaagaaaaacatgaaaaactaatggcagaaaaatttctaatttgttgaaaactacatatccatagaagtttaaaaaaaatccatccaattaaaaaatggacaaaatattgtaaaagtaaattcattaatgacaagatatgaaatgcaaatgcacacattgaaataaccttaagtatcattagcctttagggaaatacaaatcaaaactaccatgagataacgtcgtacaaatagatgacatccatttgattgattaaacaggaaatatctagatacatcaagtgatgtaaagattggggaagaactggggtatttatacactgctggtgaacaattaaaataatatatccactttggaaagcaatttagtagttctttaaaaaaaggcaaatatacgaatgcaacatgatacagacatttcactcctaggtgagaaatgaaagcacatgtttattcaagacatgtacattttatttctaatgtctcaaaacataaggaacacaagtgtctattttcagaatgattaaacacatttttgtgtattgatacaattgatacaatgcactcaataataataagaaagtaaactattgacatacgcaaataaacagatgggtctaaatataattatgttgagtaaaaaaacagattaaaaaagaatacacattgtatgattacacttctgtaacactagataatgcaatgtaatatcttcctcggaaaacagatcagtggctgcctaatgaggtccaggagatgagaataagaaaaaaggaatgcaagggacatgaggaaactcatgtgagtcatgcatatgttcaacatcttagtttttggtggcttcgtatgtcaaaatgtacacgttatatattttaaatgcgcacagtgttattctaattaaatctcaacacagctataacaaagaattgaagatcttttgtcgttttactggagaaatgcgtttaaaatttcttgggagggaaatacataaaatatgtaatagataatttccctcgggaaggaaatagataaaataataatacaaaaactcattgccagtttttccttctattgacaatcactggcacttgacttcatgtaagccacatgcattcgtttaattaaaatgtattaaaaatgtaccatgtgctatgtaggtgtagcaaaataaataaaacattgtaatgattgttctgagagaactcataatctgatttatttctctagagccgggtctgattttctactgagagttttcccttcctcttcttttctttcttttacgtacctactgatttttccttttcttcctccacctagccatgctactttcattttttactttattctcttccttgtgatttactttggtgaatccaatagggttaatttattcttactacttctctggttcccagagtctaaatacaggacctcccaggaagaaatgggttggttagtgattatttgtgattctacgacttccaagttggttaagtcaaattcacgatacgaaactgaagaagtcaaaagctgtattttagaaataagacaaatgaaaccaagatagaatttaaaaaaatgagaatttaagctagagctttccaagttacttttcacttctcttttctctatcaaatgatgcatctctaaaaatttggttcattttaatttagacttaatttcttgcatcatgtaatgatagaaaatagaaaatattccaccgctatatagtggttattttggatcacatcctgttgtaactatcctaaaaaaactttaccatgtaattactactattatttccattttacatatgagaaaattgaggcatggagagattaagtatattaaatctcacctgtagacatctggcagtctagcaacatagtgtgtgtgtatgtggagactacagtaagtcctcacttgatgttagtgataagtttttggaaattttaagcaaagcagcatataacaaagccagtcttactaggctatttgatgtaaacacgagttaactttctatggcatatttctggtcacaaaacatcaccaaacttcaaaagaaagaccaaaagattactaaatgttgtcattgaaataaatatgagctatacatacattcaaaaaattaataaaaacaaggatgatcattactgacccagttgttcttgtttagggtcgaggatgaccagagcctgttccagcagctgagagcacaagatggaaaccagccctggacaggtgtcattccattgcatgctcgctctctctctttctctatgtctctctctctctctctctctctctgtctctctctctttctcacacacacacacacacacacacacacacacacacacacacacacatattcagactgggatggtgtagacacgccagttcacctaacgcacacatctctggaattagggaggaaaccacagtaccctgacaaaacccacacagatgtggggagaacatgcaaatgccacacagacaatggccctagctgggattgattcttttctcatcaacagtataatgaaaaaatattgaccaaaataatgtattcaaggaccagcggtattaggaagaaaagagctgatatccaatattccggtagttcagagacaagcacagatctataagtaagcttttatcttcttattttctctacacaaggatttcgcctcaaagaattattttccagacttgcttgataatttcaatttcatcacctagtaaaaggagaagtgggaggagaccctgagtagtggaaagcaaaacgaacaattgttaatttgtgaaactgttatttaatttcaaatgttaagtctaaagaaaattcaagataaaagaataaaaaatatgtgcttgagcacaaatggctgccgttgtattattcttcaaacacaaaagtaaaggaacagtaatttatggaaatgtaacaaagaaatttggatgctagccaatttagaaacaaataaaaagcattaatttgagagaaaaaaattcttgccttccagagctacctcctcacttctgggagtgttattatttagcagactgataatgtcaatatccccaaccagaaccggagagaaataattgaaaatcttggttatcacgggtttcttttttgtactaaagttcatatgagaagtttaaagtcaattggaagtagagagtaaaatgaacctgatacagtggaaactttgaaaaggtatagaagctttaaaaaaaagtcatcatagttctctgaattgtaggtattttctctttaggcagccttccaaagccctttcatgctagtgaaagtaagctgtgtgctactttttgatgatattgcccatgataaacctcaaatggtgaggaaattcattttcagacacagatctgaagctaacttatccaacttatctgatcagaaaatcttgctgtaaatctttcaaaaacaagatgacttgtgagatttttagcaatccagagtgtgtctggggagaatatgtgacatgagcagttttctctatggtttcagctaataataggaaatccatgacccaaggaaatagaaatcctcacgtgagcaagaatatcaggtcttcccaaagcccataaatgtaagaaggattaaattatgtgtgcttactgaatttataattttatttactccaagaagtttccccacttatcaaattcattgcacctagttttaggaattaatagctaaaatacagataattcaaatctattttgattcttaaaaatcaagatctgatcttcagtcctgttttctagaggtgatgtatagaatgataatatgtatctcgaaagtatcatctgacccttccagtgatctgaaggagctaacttgattgagttcaagcagaaacgaagtttttaggcagtccgataagttattgctgacttatttattttcaataaataagactcattttgctggatttctttttcttttgcataacagtcacttgccacttgtcgtagcaaactttttttttttttttttttttttgagacggagtctcgctctgtcacccaggctggagtgcagtggtgcgatctcggctcactgaaagctccgcctccctggttcacgccattctcctgcctcagcctccggagtagctgggactacaagcctcccaccaccacaggccggactaattttttttttttttgtattcttagtagagacgcggtttcaccgtgttagccaggatggtctcgatctactgaccttgtgatctgcccgcgtcggcctcccaaagtgctgggattgcaggcgtgagccaccgcgcccggccagcaaactttaaaagaagaattcaatggggagatatgacaaaacttagatgttttagtaatactgcataatgtaataattgaccaaaatatttttacattcctttgagataatactaaattgtattaaaacttagtcttgctaacatatgtgggcctcctttgctccagaggaaagtgagaatgtcttaagtcccattttcagcccctagatttattatatagcaacgcacaagtcatcttcttcttgtcactctcttcctgaaggatttcaggcaaaacactaaatctctcttgacctcagtttagtcatctataaaattaggggattggagcagattatctctgtgtcttgtaactgtaaaattatatgttttatattatttccacattttttcttcagttccccctactgagatgaaaaccttaaaaaatgaatagcatttgctatcttctatcccattaaatattgtttatgaaagtagacacaataaaacactgagctctttaaaactcaatttttgtagaaaaggatactggagctcaataaatgtaattccttgttcagtctcatgaagacccttaagaatataacagtaatttagttgcggacctatttaaataaatatcctatactcttcctctgactattccatctccaactaagtatataatgttccatatatttgatatttcaaatgtgtttttaaaataatggtcatatgtgctttgtaattatcttctttgagtcaaatatacttgcaaaatcaaaagatcgtgtgtgtatctattaaattataatgtccacttaaataaaaaaagaaacaaaggagactatgaatctaataagtcaagaaacaataacagagaagcaaataatagcaagttaatataaatgtatcagctcaatttaatcattaagaccatccaaactgcagaggtttacttttgaaaaaagctaaaagtcaaatttccaaaaaaaaaaaagacgggatggattttaaaactatgcagagcttatttaagagcataaacttgataaaaatgtaaaaaatattggaattacaataattacatgacatcatattacagtataagaaagtaatgttgtttgttccatcctgtcagtagatggttagagggtggaattaatgtgatcaaattatcctttttcatatcattggcatcactggagaatatctttttggagagataagaagagatagatgaggcattttggggggaaggagggattaaatgtaagatttataaatagttaatattagataagagtccttagggagtataaactttcctttgtcttctggtacatttgtctgcctgtgtggaatattctaaactcacatacactattttgtacatacaaattttaataacctttattagattcttttagaacagatggatgaagaaaaatattaacagcagcgactccttttctgccatctattccacatggcaaatgatctacaataaggacaaataatttttatcaaagaaaataattgtttacctatttattgaaagtatagaaactagatgtaaattgaggtctaaggaaaccagtgttgtaaaagaatctaataaaggttattaaaattatgaaataatggtgctaagtaagaacccatcctacaattcagtgaattaaagcaaaaagtatttattttgataatttgtcttgaggttggctgaggtgtggctgttctagactgagcagagatagacttcattataagctgtaggctgggtctggttagcaccgcatgtctctcatccacacacgttgattctacggattacataatgcgtgtgcttctcatctgatggcagaagcacaagagggtcaagcagaaatataggatttctctaaaaagaagaaaagagaattatacactatcatttgtattcacattctattgacaaaagcacggctaagccctacatctatttttttctaataaaaatattatgaagttagtttcacaaatctttattctacagaaattaatgtagctagaatttctaagcacataattttttactgaattcaagaaacatattttacagtctctttataaattgtttgattgtaaaataaactatttttagtttatacttatttttccctgctcaaccaacaaagtttgataaattattttataaatagtctgttctcccattgcaaagagattgccttgcacacaattaatatacgaaagtgagatatcacctccttgtaaaatttaataattaaatcatccttctatgaaaaggatcataaatgtttttgttttattacaggtaatcttagttttaaagatatgaagtcatttgtgcttttcattcttgatgcaatctatagtttttttttaagagttttccacacattacttatttatctttatcagcgcacatatatctattccccaggttatacagagttcattgatgatgactaagaaacacttgatataactaaaagtttaattttgtatgtagctaaaattctacatgtagctacatttttagatagtcattttgtattgtaggaagaaaagtattggaaacaaagaaaaatgtatctccatggaaatttctgtatgctaaaaatctgtgggtggttatttctcctttcctccttttaaataaactggacattatattctatgatcaaatattttatggatcggctttactaacctctactggttttcatcaaatttttctcctcttacttcaatttatttaatcacttattgacaaagtatgtgccagccctctaagataaatctgtaaatgaaaaactttcaaataaaaaaataaatatatctactgtattggtaactgttcactgcagtcttctacactagcacagaaaatatgtgcatatatcgcatgattctttgttgagtaacttacaagaaaatctgatacattgctcagtggatgaagaaatttggtcattcagtttagaaaagtaaaatcaaccaggaaaatcttctcataacttgcgcatgttgacaaaaaaaaaaaaaaaccagcatatataaatctgtgcttgagccgaacattctatttgacaactactgagtttgtccagataaggctgtgtaagtatttagccttgcagctttatcacacgactgtcatatactccataattgcttttgtaaacttagtcttaatggtgtctaggttcacaccagagcaaccatctgaaaattcagtgtcagcttatgatgtatgaactttctttcagtgtgtagatgtttctaattttttaaattacatttttgtatatttccatataatgacctaaaatcactttgattctcatcactaaatgtttttcagttactgttcatgcgtacatggtattgcatcagatattattcaaagctagttgagtagcatatatggatgtttgtttaaactagcttatatgtgtgtatatatatatgtatatatacacatatgcataaataggcagatatataagaagcatacaaaggataatcataagaaaattacaaagatataagtgaaattatatcaattgcaaattcttaccctatttaaataaacattgtatttttacttagttatgcatatacaatttaatggtataattttataaatcctttcttattttaaaatattttatagtcaaggccaagaggcttcctaaaatttggctatatgctaaaattaaaaacataattttatttccctgaagtcaaaattaagagttatatttattctgtttgtggaaaatgaatcttaatacatcttataatacatcctataattataataatatcatataatagaatagtatcctagtttcctttccttttatgttctcttgaattcctacaaaatttattcaacaggtaattttattgagagcttatcatgtgccaggagctgtctttggtgttgagtattgaatcataacccataacaatacccctactgtcacaattgtggttaaagcaatgaggggcattgtgcttgcaacaacctcaaataattttacaaatttgcccgtaggatttcttcccatttggtattgtcacaacatttttctagcacatactacatgtttgaaaaactaaacattttgttttccattctctttatacatactaaagttttagtttgtagaattttttgtgtttactttctttttcaatgattatttttcttatttgcattattttctttttcctacttctttgccctgtcattttttctaaacttggcgtcttaatttacagggagctgatcataatcctgaattacacagtcctgaataccataatcccaaacattaatttccaaaagatcaaaatctcagagatataattctgtaaaaagtaaatatttttttagaaaaatatacatttttaaagggatttatttgagaaatgtataaaaacccaacagaacactttatagtccattttatacaatgaaatagacaatagttttttactttttttgcaatcataaactttcagctatattataatagtcacatgggaataacagttatgaggacacaaaccatgttcataaaatatagttagataaagtgaatgtaaaggccaggagcggtggctcatgcctgtgatcccagcactttgggaggccaagcctggtggatcatctgagggtcaggagttcgagatcagcctggccaatatggtgaaaccccatctctactaaaaataccaaaaaactttagccaggtatggtgatgtgtgccagttatcccagctactcgggaggctgaggcaagagaatcacttgaacccagaaggcggaggttgcagtgagccaagatcacgccattgcactcctgcctgggcaacaagagggaaagtccttctctaaaaaaaaaaaaaaaggaaaagaaaaggaaagaaagagaaagaatgaaaaggaaggaaggaaggaaagaaagaaagaaagaaagagaaaagagtgaatgtattttatatatatatatatatatataaaaatataattttggtcggctattgtgtgcacttagctgtttaactttggtcgtctgaagtattgtgatggacaacctaagtctgtttgatgaaacagatcaaaaacaaaattggtcaccaccacataaacagtggcccaaagagccaggatgtcaacaatttttatatttcgtgaatgcagatgtagaaagagaatgtcagtttatttactgagaaagcttcaacattttcacctacaggcacaatggttacacacaaagtcaatgttgtgataatgctcttttgtaaagtcaaattagcaaaaaatgcataaaacaagttagaactcttttaaaatctttacacaatttatacctccagtattggaaatgataccacgataaaccacgtatcatagtgaattgtaaaaaataatgttgacaatttaaaatagtggggaaaaactaagaaaaaaaaacagacatacgaaaaagtgcattacaggaatagattatgggcaattgcatggaggtaatctataagagctgaccgactttcattatcttgaactattttttgaagtcttgcattgcaattaaaagctgccatttttcttttagggcattgctgtcttcagaggatacattcaaattcattttctacctggcattgttctttttaaaattattttgattctatatccacctacagaattcttctctgtaaaattttcatattttttgtgccctgattctgtgttgttctgggtactcagaattctattccacagacactcatatacagaacacaaatttggagtacacaatactggtgataaaacagcaacaccagtgcataagtgtcttcttatcctactgtgcacataaccattttcaaaccagtcaataacttcactggctggcttcttcagcaaattctgctttcattcattaaaaactcttggaatttcattggctggaaggaatgccaatgcaagcaagtgacacattttaaaactaaaatttttgttgtgtgcctatgaagttgccaatccactcttctgaattttctgccaaatgcaaataaagacaacaacaaggtgatatgctgcctaatacgatgtaactagcatgatgcagctatcctgtgtacaatcgaaaaccacagtaataccttcccaagcatttggattttaggatttcaactctcagaattctcatcttttgggattgtgatttttcagaattttagatgttagggacttcagactttagaaatttagactttaaagattttaatctttagagattttgattatttgaaattccaacattcgggattatagtgctcaagatttttgtcttttgggattatgacccacacagtaatttttaaatactctaatgtttaatatatgcacttaaaatgataattctccttcatagtattgaaattgcccaacttataagtattgataagttttatttaggtttttgattgtaggtatttcatgttttcaataaatactttcattcataaatatcttcaaattgtttcttttttagttttaatttccaattgcatgagagattttgatttagaactgtgttctgatttacaatttgagtgctttttgttaagaatgtagtctatataacatcaatgtattggtacttagagactattgctcagatacatagttgatacactttttatgtgtgcacttgaaaatatatgagtaatataattttggagaacagaattctacacacgcacaagcacaaatatagacacatatgtgagcaaattgttaattgcactgtcaaatttttctatgtctttttctttcaaattctaatagtatttgttaaaaatggcccactatgactatgctatagccttactgtttatgctgttaattggattttataactgcatacataatacttgagatctagtttgctccattgtattattgcttctcttcataaggtgaatgtttgctcaaaattgtaattcttctggtaatttattcttgtgtaaattatgtcactaaatcattacccattctacaatcctgtctttccagatttataatcttggcgttcctggtagctacaacttcacctgtgtgttttgcttcaatctaattagagatgttctagtgtaaaataatgctcatctcttcttctaatcttgcacacttataccatctcagcttctagaagtgtcccagaagctggaccctcaatcaaatatttacacctttgcctagggttccagctatagaaaatataaacagaagacaaatgaacataaagaaaattatttcatcttaatcttttattaagcaatatatattacaccttaaatatctgttatctaatatttgattgtcttttagaagtttctgatgaaaactatgtaatattccaaattactgattacagaaagtaggccaaacaggacatttctgttacaaggctttatccatttttgaacatgaaaactttacctaagattattttgtccaaggaagtaagtttatcttcacttttacttcagttggattggtgttttatctatattatacacttacatggaagttataaaaagttttatttcaattagaacattcaatgtgaaaataggcttttactctcaaagaaggagatgatgtaatatgttttcaattcctgttccatttgttctgaatgctgaatgtatttctgtttaatttaatgtcttttaggtagtacttcgcaaaatttctttaaagactataaacaattatccaaatctatatgaataattgctgagtttttcatttgtcagtatattctcattatcactaataattttgctccaaacagctaaatgttttcctcaaagatatctttcattttatatccttttatataaaaaatttttagtttcctttaatgttgccaaactaaaaaaaaaaaaaatggcaggacagtaaaatgctgtgaagtcaccttgttctttcaattcttctgttttctgcctcaaagtggtaataaaaaccaggatatgtatttcttagttggccctgaatcaatcatcaatcggttattcagtcaatcacttttattttcccccttttccttaaaagaactttttcaggggtctgcaataatggccattctacatagactcaacttatgatcatgggattcttggatttaatttttcttttattcttttttcatacagtttttgtgagaagcgtcaattagcaaagtagttttcagatattcctgtttttgtcaactaacattatgtacaatcaaaactaactttattgacaattatttttaatttacattcgtaatatggtcagcattgatattaatattttaaagacatgaagagtagggaggatagatattatgtttaacctaaagaagagatagaaagacaatgagcctccatcctccatccatccttttccaaattataaattcctcacctcccttaaaaaatacaatcatgttttttaagtcatgtaaatagtagtagtcaattatagtatcttttaataaaataattcataaattaaatgcaaaattgtacctcctcatatatatatataactttaaatgacactaatcttgtacaaatccttcaaattttttcatgcatctttaaacctcatgcatattcaaacctcacacatattcaaaagtatgtgtgtgctaggtaaacatagaagacatcccctattgatctccacctcctgatattcacatttgtcgtaaacccttcttgaatatgggctgaacctaacagctagcttctatttaacacagtacagcacaaggggaaggacaccacttccatgaggaagttatgaaagattgtgattttcttttgtggagtatattaatagatcccaggaattcatggtcaaaaattcttgttggatcattactctgaccattctaaccctgctcctattaaatcatggttataccagacttaatggctggaaataacaggaatgctcaataaatgcttatctgttctactgtgaaatctacccctggtttgtcaattactgcaaaacgtgagtgagtctgcgcataggccaagagtctgtggtaaaggaaggctttttcgctgtaaatactcagaatgtttcttactattccactggaaaatgaagcaagcttctaagtatgctcttggtaaagaaaaatactttgatgtatgtgatctttagaatagtagtttcctgctatgattaattctaagagtttcaaatctgctagttagagtgaaatggtaagtggcctgttagcccatgtctgctgcatgataggcccagtgggaccacaaaccaaaatatcctcatggttattttctctagtctggtaaatatttggaatgaacaattctgcaataagaaaaatttccattgtggttccctgacttttgaagtatggattttatgatggaaaggacaatgcccaggaaagtttctttccctaaaagtatcgtcaatcaaaacaattgcttactccttggaagattatagagattagcaactctatcaaacacttgaaggaaaccctgtgtagttttctaaataatctcattttcaaaaaatagactttaaaaaaataaaaatagaaatttcaagttcacagaaaaatttagcagaagatacagaaattttctgtatagctcctgcccccatacatgcatagactcccccattatcaacatcccccaccagagtgctacattggttacaattggattatctaaattgccgggtgtgatgactcatgcctataatcccagtgctttgggatgccaaggtgaaagcatctcttgaggccaggagtttgagatcagcctggacagcagagtgagacctcatctcttgaaaaaataaaaaaataaaaaattggccagtgtggtgggtagtcctagctaccagaaagctgaggcaggaggatcgcttgagcacaggagtttgagattacagtgagctatgactgagcaactgcactccagcctcggtaagagagcaagactctgtctcaaaacaaaacaaaacacaagtaaaccagctaaattgacacatcacaatataaagtgcatagtttacattagggttcactcttggtcgtgtctattctgtggattagcacaaatgtatcatgacattttctaccactagagcatcatatagaatacttttactaactaaaaagttctctgtgctctctctgcttatccctcactcttcccactctgctcaagccctggcgatcactgatattttactgtctccatagttttgccttttccagaatgccatacaattgggattatacaatatggaggcttttcagattggcttactttagttagtaatatgcatttaactgtcttctatgccttgtcatggcttgatagctaatttatttttagcagttaataatttccattgtctggatatacaacagttaatctatccattcacctattgaatgacatcttggttggttcaaattgttagcaattttcaactctttttgggtagaaactgtagagcagaattgctagatcatactgaaagagcatgtttagttttgtaagaaactgcaagacaatattatgatgtgactgtaccattttgcattcctaccaggaatgaatgagagttcctcttgttctatatcctctccagcatttgatatagtctgtgttctgattttggccattctaatatgtgtgtagtgatatctcatttatgttttaatttgcattttcctgttgacatgtgatttggggaatctagccgtgtgcttatttatcatctgtatatctcctttggtgaagcatctgttaagacttttgatctaatttttaatttttctttttatttctgaattttaagagttctttttatcgtttggctagtagtgccttgtcagatatatcttttgcagatattatctcctagcccgtggcttgtcttttttattctcttgaaattgcttttgcagaatggaagtttttcattatagtaatgtccagctttttaaaaatggataatgtctttgttgctgtatctaaaaaggcatggccataccctaggtaatcttggttttctcctatgttatctcctagaaactttatagttttatacattaaacaacgttaatgtctataatctattttaacttagtcactgtgaataatgtaaggcactgtgtctacaaaaatgtatatttttttgcctgtggatgtccaaatgtcccagcaccatttattgagatgatttttttaactttattgttttgattcctttgtcaaagatcaattaactatatttatgtaggtttattttgggtggattgatctatttgtctattctttttcacaaccacactgtattgattgccatagctttatagtatgccttaaaatcaggtagtttcagtcttcctaatttgttctactccttcaatatcaagttggctattctaggtcttttgcctcttcatattaactttaatatcagtttgccaatatccacaaaatagcttcttaaattattactgggggtggattgaatctatacagcaaattggaaaaactgacatagtgacaatcttgatttttcctatccataaatttggaatatctctcaatttatttagtactttaatttctttcatcagaatttggttgtttttctcataaaaattattttgtttgatttatacctatgtgttgattggaatgccaatataaatgttacccttttttatttacaatttcatttgttctttgctggtatataggaaagtgatttacttttgcttattagttcatggaggtttctttgctgattcttctgtattttctacactgatgatcatgtcatgtgtgcgcaagagcaattttatttctttctccccaatctgtatattctttatttttttttgtcttaattgcattagctgggacttccagcttgatgtttaaaaagaggtgtgaggcagggtgtggtggctcatgcctgtaaccccagcactttgggaggccaaggcaggtggatcatgcggtagggagatcgagaccttcctggctaatacggtgaaaccccgtctctactaaaaatacaaaaaattagtcaagcgtggtggcaggcacctgtaattccagctacttgggaggctgaggcagggggactgcttgaacccgggaggcggaggttgcagtgagccaagatcgcgccactgcattccagcctgggtgacagagcgagactccatctcaaaaaaaaaaaaaaaaaaaaaaaaggaggggtgagagggggacatctttgctttatttttatttttcatcttattgggaaaacattaagcttcgcaccattaattctggtggtagttgtggggttttttttttaacatattctttattaaattgagtaagtttctcgttattctcagtttattgagtgtttttagtatgcctgggtgttggattttgtcaaatgttttatgcacgtatattgatataattatgtaacttttttctcttttatgctgttgctatgatgggttacactgattgtttatcaaatgttaaaccagtttataccatggataaatcctactcaatcaagatgtataaccacttttatacatagttacattcaatttgctagtattgagaaattttgcatctatatttataaaaggtattagtctgtagatttattttaatgtctttgtctggcttggggattagtgtgatgctgggtttaaagagcaccctttgtgtatttttatttagagcatatctaaatagagacatgagttacaaagtttaagaatataaagaatgagttacaaagttttttctcccttttattcttggttagcctggctaaagttttgttgattttattaatcttttcaaatagccaggttttcttgtcattgtcttttttctattgattccctgttttcaattttattaatttctagtctaattactattattcattttctgcatcttacttgtgatacaattttttctagtttcctaaggtggaaatttatattaataatttagatcttgtgatggttaattatgattgaagaatacaaagtattttttctgcttgtgtctgtgagggtgttgccaaaagagattaacatttgagtcagtggactgggagaggcaaatccaccctcagtctgagtgggcaccatctagctgaatattatagctgcatttggtgcacttggtgcagctagaataaagcaggctgaagaaagtggaaggacttgacttcccaagccttctggccttcatctttctcccatgctggatacttcctgcccttgagcatcagactccaagttcatcagcttttggactcttgaaattacaccaggggtttgccaggggctcttgggccttagccaccaactgaagactgcactgtcagcttccttattattgaggtttggggactcttgctggctttcttgcccctcagcatgcagacggcccattgtgagacttcaccttgtggtcctgtgagtcaatactctttaatacactccccttcatatatacatctatcttattagttctgtccctctagaaaggcctgactaatacagatattttcttcttttctagtatatatattcaatgctatataatttcctctaaggattgctttcactgtgtttcacaaattttgataagttgtatttttattttcacttagttcaaaatgttttttaacttgtcttgagatttcttctttgcccatatgttatttagaagtgtgtttggaatttttcaattatctttctgttattgatttacagtttaattcccgtgttttctaagagtagtcattgtatgatttgtaatcttttaaattgttgaggtgtggtttatagcccagaatgtggaatatcttggtgaatgttttgtgtgagtttgagaagaatgtgtattctttcactgttggataaagtagtctatgaatgttaattatatctagttgattagtagaattgctgagttcaactgtgttcttactgatttttacctgctggatctgttcacttctgatagaggtatgttgaagcctccacatatgatagtggattcacctatttctccttgaagttctaccagctttttcctcacgtattttgatgctgtgttgttaggtgcatatgagtaaggattgttatatcttattggagaatatacccttttattatttgtaatgccatcctttatccctaataattttttttgctttgaagtctgctgtgtgtgaatttaatataactattcctgtttgttttgattagtgttagtatggtgtatatttctaaagctgttacctttaatttatacgtgtctttatatttaaagtgggtttctttttaaaacaaattaaagttggatgatattttccaattcactgacaatctctgtcttttaactggtacatttagaccattgacattcagtgactgttagtatagttgcattaatagctgccatattggttattttcccacccccacctttttttttctaagatggagtctcactctgtcgccctggctggagtgcagtggtgcgatcttggctcacagcaacctctgcctcccaggttccagagattctcctgcctcagcctcccgagtagctgggaatataggcgcctgccactatgcccagctaattttttgtatttttagtagagacaaggtttcaccatgttggccagactggtctcagactcctgacctcgtgatttgcccaccttggcctcccaaagtgctgggattacaggtgtgagccactgtgcttggcctttgttacttttttctatttgttccttgttgtttgttcttatttttgtcttccactcttttcctgcttttgttattttaattgagaatttaatgtaattttattttctctcctttcatagaaaattatctatacttttttttttactttgaaaaatttcctctccttttaagttgccagtttgacaggtcaagaagatggccggttacagtactcaccttatttgaacttccaggaggttttgtcacagttggtcctcttttgtctttaaacattttctcctaatattttccagaattttacaaccccttgtcgtttgtcttcctccttccattgctccatctccatattctctgttttctcatcgcttctcaaatctctgataattgcccaggttttgtgcttggacccctttttttctgcatcagaactgtttcttgtggtgtttcatctaattccacagcttcacttgtcttctgtgtgttaatgacttccaaactgataacttcaggcaacagctctcctctgaattctagttgtgtatattgaaattcctactgtatatcttcacttagatgactaattagctgctcaaatttctcatattaaaaataaccggcattggtatagtcttcattgtcaccatgtaattagagagaccaaaataaacacctttatcaatgaagacagactctgaggttaagggaaaaaaaagaaaaacacctacagattgagggttcaggctttagctggcataacaacttcctaaattcctatggatacaagaaaaactacactcttcctaagttctggaacaataggaactatcactaatttacaacccagacaaccacaactgattgaacagaggactggccttacattcttttctgctaggaaactgcagatctcaagcctgtttcagccagaatatactgactgtgtaaatattatctctgtgccctatagttaaccttttgatgtaaagagccaacatccatctcattttagtgctaaaactccaccctaaagtaatatacacatgtgtttttctcctctgttaattatgtatagctttctccaaaacctactaattatgtatgattctattaatattttgtggcacagatcctgtggtaaagcataaaaagcaacctgtcttttacctctttaaaaagagagcaccttaggtccatgccagagactgtcttttcctggtttgcaaactgatatagccagtaaaattctcctttctactatttagccatcctggtgatcttttgcgtggcacccactctaaaactacacttggttttcttttcggtccaggataacaacttcatttttccttctcaacgttttttccttagcaatgattaccatttggcaagcaattttttttttgtaagttttttactttgtttggtttctattttcttccactagaatgaaaataacataaagatatatatttttattattttgtcttttcaaagctcatacttagatggttcctagcctagaatttaacattgttgttgaacaagtgattgaagtttagaatttcaaaaatgagaacaaaaataataatacaacagtaattcagttacatgttattcaatattttcctcccaaaagagcaaatgtactgctgatttattttaaatcctccttgtttccaagcaacatgattagtgtttgcaaatatcctattataaaattttgatccatatcttgtaaggaaataaagtttattagttatgtagcttttttgaaagctttcatatgcaactttctttatttcctggtgtttgactatattccttttttttctctttgatcaactattacatttttaaagcaatattaaaaacctctgtagtcgtaaagaatttttctcaagttagaggtaagattttctatgttgtcaatcagtgccagtccaagttgctatgagatatatttcaaagctgatgcaacagcctatgtatacactaactgaaaaactctcattgtctttttttaaatgaaatttttctgtttaaaatgaactaattttaaacatcctacctagctacaatttcaaagatatatgcttattactcttacgtgaaaacagaaagcagaagcatgcagagcagacaaaactgttatctcttaaactgcttcttctttcttcttttacctctttaagaagtgatttccccatggttatataaaaatgtgaatatccgaacacagtaagattcatacttgcaaaagtgaatctctgcattcaacatctgtctccttgtaggcttttaaaataattatgtagatatctccagcattgcttttcaatattgctatttgttgggttttctttttttttctttttttgagatggagtcttgccctgtcgcctaggctggagtgcagtggtgcgatctcggctcactgcaacctccgcctgccgggttcaagcaattctactccctctgcctcctgagcaggtgggattacaggcgcctgccaccacccccggctaatttttgtatttttagtagagacgggacttcaccatgttggtcaggctggtcttgaactcctgacctcgtgatccacctgtcttggcctcccaaagtgctggggttacaagcgtgagccatcgcgcctggccagattttcctgatggttggctatagtgcattaaatttgttactggccatttgccagtgatttagtacaatgtagagttagaaacctgtttatcaatacctagtcaatactaaaaatatgaattttattgctgtataacatctcataagttgaaacttggacatatacattatgttaaaaatgtaaaatgaacagtaacacttaaacttctataaacctattggggaggttcaatgctatatggacataaattaggataattctgtaaagtaaacataaagcaaattggacctattagaagaagtggcaagatatgaattcaaatatcctataaactgattgagtataattcttcttcttctggcacttaaaagcaaatttgcatatagataggtatgtttctgtaaattagctaatttttattgcagaatctcaatttaaaagtcagtttattttttgctcatgctccatgtttcattatctgttgttagaatgccttaaggtggtcaaatttaacaaaataaataaataaataaaaggcaaccagttcaatttgaatttcaagtaaacaatggacatcttttttagtataagtatgtcccaggcaatatttggaatatacttttactaatgttgtttttgtggttgttttctggaaatcaaatgttactgggtattgtgtattttatttgacaaccatacccttgaggcatcaaagtaactcagaaagcaggttggcaattcagccagccacaatcccagacatccctggtcaccatattagaggaaaggggagtacggagtttctgcatcagagagtaatgattatagtcctcaattttatcaaattatttttttctatgctgtttgcagactaacaatcgaggagagtgttaattgtttttcccatctcttatttcacataaattaattcatcctctaggagtcctctataggtttatagccagtttttaatgttatcccctgggaaagtaaactaaggagaatatgcttcaatataattatattttatcctttattaaaatggtgaatatattttctactaagtcagtatggttaacaaatatacaaagctactgatgatatctatgagaggatatgctaaattagctaaagggaacagtcaaaatagaattttgcaaaatatttgttaagtttaagaacaaaatgaaatataaaatagcataggtagacagcatgactaataaaaatacacactgctggaataatccagtagtactgatttcttaaaccattagtgaaaactcttctttaaaaacagagagcacccttttgtgtatttttatttagagcatatcttgtattacaaagatttagatccatctgttgttccatatttctctaaaatttctaaagaaataaagctcaatattgactatgtgtcgtcaatctctctgttaagaaaaaaatcaaattatgaactcctataacaaaaactggaacttaatcatttacagtatctagatgctgaagtagcaaagattagacaagagcaaattgggttaatttcaatgaatattattttggtttaattggggagaatatatggaggaatttttttcaatattcaaaggtgatcaaatccaaatatgttgtttagtttgagatgtcaaaatattggagtgcatgaagactacagacaataaaaacttaaatgaaaggattaggaggccaaaattctgagaataatttaaagcatatttgtaatgtgtctttctcttggaaagttattggttaatgattttatttgcttttccagtctctttggtatctgccgtgaaagcaagatgacaaagggaacgcccttgtttgtagtgttgcaataacactcgctcttgggccaccactgtggtctaagatctatcacctgcagaagtgacctgtggcaagtgtggctactctgccaagcacaggagaaagtataactggagtgccaaggctaaaagacaaaataccactgggactggttgaatgaggcagctaaaaattgtgtacagcaggttcaggcatggattccacgaagaaacaacacctaagcccaagagagcagctgcttgcagagtccaattcatcttcagaatttcagtgactggaaatgcaacgaatgctctagttttatatttttttcttaaagattttattttcttgcttgttcatttttgcttgcagatagagaatttaccttaatgctgggacagctttccatctttgagtctagaatttctatgtgcctctttagttttcggagagaactagtcaaatttgaggggtctcaagtattactaaaggagggtgagaaagattttacactttcttttctggtttaggatttgaagacatctgttctcagtaatttttagactattaattttgttgaaaaaattaaaggatggttctggatatatgcctccttttatctctggctttaattataacattgcctcattattaacagtaattatgttttaagagtatatttgagctttacaaacttgttagtattaaacatttgtatatctattgaatactttaactcatatatttaaatttcttagtaccaaattaaacttattataaaactaaataaacttctatttactggaaattgtatttcttgtttatattctcattacagtttataggtaggcaccgcttatcattattaccattgatagtatattgaaacccttgttgtaattccagttgagagaaatcaagaagttgtacaaagaagttttaccaagagaagaattcaactagacacacatccatacatacttgcataacctatgaatagtgttaagactatattattaaaagtattggttaattaataattaagtatacagaacttcaaataagtactacttctattatttgacctccattttctgttctagtatttttgttggaagccataaaacaatttgtatcatgtaagactcagaaaaataagaaaatttgcacaaacttggagaaaatctagagtaattataccttctttaagataatagataaaattatttcaataaataaattttatcaatttacttgacatttatatttctatggtaaatattgcagactggcaacagatgataacttcaaatagtgttctagaatgtcattctagcttgcatagcataattttttcacagatgttctataatagtattccaaaatgctacttagcaacaacaaaagcaatggcattacacattttaacaacattactgctcttaatatttcccccaaatctaagaaatagaaatggtaaaaggggccgggcatgctggctcatgcctgtaatcccagcacttccggaggtggaggagggaggatcacttgagtacaggagttcgagaccagcctggcaaacatagaaaaatcacgtctctacgaaaaatacaaaaattagccaggcatggtggcacgtgcctttaagcctagctgcttgggaggcggaggcacaagaatagcttgaatctgggaggcagaggttgccttgagccgagattgtgccactgcactccaggctgggctacagtgggagactctgtcttaaaaaaaaaaaaaaagaaagaaagaaagaaaaaagaaaagaaaaaaagaaagaaaagagaagaaatggtaaaaggatgtggtctctatttttagattaggaaatcaaaacagagagaggggttagaaactttgctcaaaagagtaacattactgaatgagagaatgattattaaaacagttgtagtctaatgtgcttttcagttaaataaattattccttctcatgtcttagtaaagggacaaatctgttaatccaatttatattgcctcctaggcactttttacagaaaccaggtaactgggtctttcatcaagttctatggtctgaatatttgtgtcccttcaaaattcctatattgaaatcttgccccacaaggtgatggtaataagaggcagggccctggggagatgattaggtcatgggggcagggtctcattaataggattagtgaccttagaaaagaggcctaagagagaccctgctcaccccttccaccacatttggacagagcaaaacgttgctgtctctaaggccgaaagtgtgctctgaccagacaccagatcagctcttgatattgaacttctcagtctccagaactgtgagaaataaatttcaattgtttaaaagctcttcagttcatggtattgtgttgtagcagctcaaataaactaaaacatcaagtaagccaagatttgcaattgcaagcacccagcacagttttggggatctgtctaaataaagacagcaaatcctctcaaaagtcttagtcttagcatccttaaagcaatcttttaaaataaagtcacgaaaaaactctcctgaagctttaggaatttatttgaatcacagaatgatcatgccattgtcaaatagctcaaaaacaaatacaagtattacttcaaaataatactagttatatataataattataaaaaacataccagaattttataatgttaaagaacttaatccgagtaccattcttgaacattttcacaagaataagaaacatgaaggctatggtctttggaaaaggtttgctattgaacaaatctttgacacttggcaaattactaacttctttttttttttttttctattttctttaaatggcactttccaaaagtactcttcaggggtatttgagtattaattaatggatgtatgtaaagcaccgtcctaatgctaaatgtgtcctctaataaagtaactgtaaggtgtatgtaaggtttcagtcttttaaagcactactattattttgttttttttgttcttgctaaagcttatgtgtatatatgcatatatatttttaacatacaaatatataaaacatttgtatataaaactttcatcaaaaaatccttcatttgagtagaatatatttactgtcaatatgcacactgcagtatgctatatcttaggggtttcattctgaagagtcatatttgctggctttttgggcttatgttcttgggggtgaatataaacattggggttccacaaagaagtatagtatgagaaaaaaacctaatttagcaaggtttgagtaacaattataaggctctgagtaaaatacaaaacaagctgttgttttgtacccattaactaaaaatccaatgaagtaaaaacaaatatgatctaatgttcagtagcacaacagggtgactataattaacaataatttattgtatatttcaaaataactagaagagtaaaattggaatgtttctaacacaattaaataataaatacttgaggttatgaaaatcccaattaccttgatttgattactacacactatatgcttgtatcaaaaacattacaggtaccccatcgatatgtaaaactataatgtatccataacaaaatttttaatgaaaaaatacaaagaacaatggggagaggagaacaaatagaagatagtggtcttcaaattttttttgaatgcacatcccaccgttaaaaaattttaagtactcctccacagtacataaacatttgtctacttacactagtaattgaataagtatacaaactgtaagcatatgttatcaaaatataccagataaaattaaaaacaatgaaataagagtgaagtaaacattttttaattcatcagtggagcagctctttctgctcccactgacaatattactataaaactatcatatggaagaagattgtcctctgccaggctaacaaatattacggtatgcagtttctatctcatactgcaaacttgcatgacaaaatcagctttttctttcttgttttcttgattttgtgtgtgtatgtggtgtgtgtgtgtgtgtgtgtgtgtgtgctttttttgttttggtcactctgttatttttgcaaacaaattagagagtgttgcatttttatctgttaaattacacatttgaatcacactgaaactcatttggaaaacggttggacagatttgaatctatgatgtttctttatataaagtatcattcactaaagttctgaatgtgatgtgagaccttaagtcagtaaataaatttggaacacttttattaaatatatcaaagactactacaatgttaaacaacattgcaccttgcaatctaaataaatgcatacaatcttctatcacaatcttaggtatggcaatataactaaaagaaaaccaccgtttattgaagtgtgcaacaatgtagaaaaacaaatttattgtttttattacacaaaatccaactacaagattcatttttcttttatggctaggttaattaaataaggtgtgtttcaatttggggaatagagctttgttgtggactgagacctcgttcaagtggaaagacagtaactgtcactatacttagttctaatttcaaagctactcataatgcagaaaataggtgaaaaaaattcaatcaagaaagttgagtaatattttagaaaaagtagcataaaaacctaaaatcattatattaataaacatctaaatatttgataactttgtcatttttgcctctgtatttaattttttttattttgagcatgcttacatttattctgagatcttctcttactttagaaacccatttcttttgatgaagagaaaaaataaagaaactgtatttcactatttgtttagtggctacatctaccattacatttaggaaaataaagtgtcaagtcatagctgtgtcatcataaatatattggcttaagatatgttttaaaaatcactatgtgaattgtaattttagtataatatgtttttaattttttgaaaatatttaggtggtgtaggccaggagcggtggctcacgcctgtaatctcagcgctttaggaggccaaaacgggcagaccacttgaggtcaggagttcaaggccagcatgggcaacatggtgaaaccccgtctctactaaaaatacaaaaattagccaggcgtggtggtgggcacctgtaatcctagctacttgggaggctgaggtggaagaattccttgaatccgggaggcgggggttgcagtgagctgagaccatgccatttcactccagcctgggcaacaagagcaaaactccatctaaaaaaaaaaaaaaaaaacaatttaggtggtataagtgcagttttgttgcaggaatatatatattttatagtagtgaggtttgggcttctagtgtaaccattgcgaagatagtgtacattgtacccattaggtaatttctcatcactcagaacaatgtacaaatgcagcgataatatctgagaatgtgaatgtttctgttttcaaaagaagtaggaatttttttctcctaatgtgacattcaatgtttgttcccaagttccttaacactaactactaacataatctacaaattgatgttaactttttaaaatattatagatatcaagatgtggatttggggattgctgaatatatataattgtattgatgagaatatcacacaaataaatagaagtttgataatgtccataatgctactaacctaactctataaattaatgttacattttcaaattattatggatacagagtattgatttggcaattattgaatatatctaaaagtattaatgaaaatattttaaaataaatgttttatagctgttaagcttgcaaagcatatatataagtttgcttacttgttgaatttttatattgataatgtatatatgcaaattactgctgtaaaatgacaataaatttgttaacgtaaagaataatttttatttttttgagatggcctcttgctctgttgcccagggtggagtgcagcggcatgatctcagctcatggcaacctccacctcctgggttcaagaggttttcctgcctctgtgtctcaagtagctgggactacaggcacctgccaccacgcctggctaatttttgtatttatagtagagatggggttttaaccatgttggccaggctggtcttaaactcctgatctcaggtaatctgcccgcctctgcctctcaaagtgcagggtatacaggcatgagccactgtgtccagccaggaatgaatcttaacagaataattgtattactacaaccacgaaggggtgtcaagatggctgaatattgcatactcgttgtaatctgccccaagtgtgtgatcttaattccttagtatctctaaatctaaattgtcttgttgctaatatagaatcatgctagattattcctaaagtctctttgatcaataaaacagctttctacagtggtcatataacaattaattttattaatataaaatcatattaaaatgtgaaattgcaagtctatatagtataagaatgtgatgcaatttaccagtcttcctgtttttttcttttgttttgttttttaagatattagaaatctttaccagagtaggttcagagattccaactcaaccacatggtggaagatttatggacaaaacaaggaaagtgatgtacagaacacagaagtgaggtacagaaacagactaatttggttatagcttggtgtttgccttttttgaacatcgtttaaacagttggccacctttgattggccaaaactcggtgattggcacaagagtaggctacagtctgtttacagtttcatttaggttatagttcacaatgtatggacatatctttaggctgaactgaaaatatgtagggaggtatcttaaggctaaacttgatttaacaattcttccccattggtcatcctctcaattttgagattgaccaaaacattagtcattgatgtcattatcactattgtaaatgtacttatttagtcttgaagcccactgcaaaataatagaacggtgagttttgtaaggtgggaacaaagactttaggttattttttgcaagggttacaatagagggtacctccttattctggaatgtcctatttacaggataaaaacaaagcctagtcttttctaggatctatgtgtttccttaaagccttagtttgatatgtcacgtttagcacaagtgactccattttggtttagttttgtctgttggggcttagtgcctaagctcagtccaaaacaatggcctcccataattttgttttaaaaatttgccccttttggccaagttctcacttaggtaagagtgtggccaaaacttagggccttcacatcattctcagttaccataattttgagtttccagtctcagcaggtcattcattggttacattgccatcatggccacaaatttgtttcagctcttgtcattctagttaaagagagacggtttgacattctagggatggctgcaagcaaacatttaaaacttttgagagaatacagtgcaccagggagactactattatgactatcaggaggaaaataccaatggtttgatgtatgctccttagccagggtccccataaaccaaactaatgaaaatcaagtaaatcaaaacatgagctagatagagtctactcacttcaactaagtagtctctttgttaattgcaataactgaatctctataatacccaatgtgatgtatttttctatgggcaacaagtcccagcagctgcacagatatttctcgtttagccagtaagtaatctagagcaaatctatttatttatcataactttcacaagagaattcagtctgttgtgcatccataggctttacagtagaatctgctgtagagcctatcatgagggataaattcctggtgattgcctaatttactccaaaccatggggggaaaacagacctaacaaatgatgcccttctagaatagtgaaggcctcttggaacagttctctttaatccatgatgtgagttaagcggagtgaacgaatgttctgtttctgactgattgtggggcaacacatgaaccattaaaattctttgcctacattgggccttcatctttcatctatgaaggtataagcttattcatggaaaaaaactggccacaaaattattcaaaaaatgaaagtacaccccatgagtgcgcacaacagaccctcttttcactctgttgttcatagaagcagaaacaaggggaaaaaaaaagaaggataagagcctcaagatattagagatgtcttgatccatgatcttgggaaaaagctgtccacatcaaagacgccatcttcttctggggagaaacttccctgattactttaacttaaggttctcaatcggtgtacagtttcaagagtgtggaaatacacttatgaggtgtgagattatgaactcaaggttcaaggtcccgaagtgttgctgcagtgtagatggcaaggtcagtctttctctgatattctcagaagatccagtctttgggttctagattgtgaagggattgattgtcctgtcagtgaaccatgaaaagctttctttacctggtgaaaatacactgtggcataatgagcgactcttataacatcaaacttcttgcatggaaaaacttttatacaaccagaaaacatgcattgaaaataacaatggaatgaaatctcctcataaatatatgaatggcccatcaggtagcagaatgtacctgaaattttgatagtctttccaggaatatgggtttgataaaccaaacatttgtcataaaccatattagcaatttagaagtcaccacacgcaggccgggcatggtggctcatgcctgtaatcccagcactttgggaggcctaggcgggtggatcacgaagtcaggagatggagaccatcctggccaacatggtgaaatcccgtctctgctaaaaatacaaaaaatagctgttgtggtggtgcgtgcctgtaatcccagctactagggaggctggggcaggaggatagcttgaaccagggagtcagaggttacagtgagccgagactatgccactgcactccagctgtgctacagagcaagattccaacaacaacaacaacaaaaaagtcagcacacacatacacagatatttaatttggatcattttatctttataatgataaatcatggaatgcagaatttataataacaaaagcttttaggactcagaaaggataagacagctgtcctggttcttcagtggtgcataattaacactggacagataccctcttgaatgccagttgtctctccaacttagatgcctcacactgataactaatgcgtcatcactggtgatttgaattagactatggagttcattcaaattgtatatctaaacaatttcagtactggctgatgtaacttaagtatctggcaaagtattttactggtatttaattaagctttgttctgtttgggttagcaggtttataaaccagtcaaccttttcattaaagttctaggaatttggccccaatccaagtaatatgattctaaagttaacctgtattcacgagtacctttcagggtcattttcgtccttccgtaagtttccttaaagacaccatattctaggattttgcctgcttgtgaagttctgagaaactgcatcagaattaagcaattaactgtgaaaataactttaaataactatgacaactgtttgtgtcataaagacacaattgacaaggaaatttgatgatttctgttgtctacaataatttaacataataaacataattatgattgatggcatatactcagacatattagaattttagaaatcccatacaattttagaaaatacatttatatatattatattccttaatatataacctgaaaaatatataacctaagaaaaccttatttcttttttgacaatgcttctcatataacttaacatggcaaataatcatctttataaccttttggatgctttagggacactctgcagcatcccaaagttataggtcaaaaaagacttaattttaaatctcaaatttgattttggaaagcctgtcaaatatgctaaaagtttgaaacacttgaccaaaaaaggttcacagttcaccataaaacaatagtcattcatttaaccaaagtgataattaaaagatttttaaaaataaaaacttgtaccctttgataaaggacacttagttttccaaacaatcaaaagtcctaagacagcatgaaagagaatctgtctcttctttccactttttttttcctttttgcagtttacttaaaaagtaaatgaaaacatttgactttgtcttcttaaaacaataccaaattttcattcaaaacagaaaacgcaattttacttttggattagtgtattattaacactaacactaattttaataaaacctcataaataaatttataaaatctatcatcttttaactacacacaatttccataaatttcattttacatttttcctcaactttttatattcatcttgttttatttattttttaccccttcaatttgaaacctttaagtaaccttaaaccagataaaaattttaacatacatattatgccttttaaaactttcttcatcaaatgcatattttccttttgtttctacattctgtatacagaattgtttctcttatatgtagtagtttttaactctcagcaaccctaaattctagtggaaagcctagaaaccaattttaaattgtttatatcaatatttgtagataaaaaccattttataatttaaaaaatagttctctaattattgtttattaacagatatacatatatttagctttttttataacatatgaaaataatatatcaaggtatatagacttaaactcatgtttaataattagtatatcggtatcttaacttgcagatgactcagacattttatgattgtctattacttaatttaacataacatgactttaagattttaagccatgaaaagaattttgaagctttgacacaggtaaccttcctaacatctttctctagtaattctaggtctcaggtagccacgaggtacccaggagtactatgaagatcaaagcctgtctaagtccaccaggacagaaaacagctgtaaagactatacctaagaatccagtccatcataaaatagccaggaggcaaaacagggaaagcagaggaaaaaggggctattttgagcttgattctggcttgcagctgctgatctagggacgaagaacatgtctctagacctcatcgtggccacctacccagacccctgaatccagagactttaaaccaaagacataaggtcacattcaaatcaaacaaatatcgaattatttttaaccaataattttgaagccatttctatttcatcaacaatttaaaaacttgctttatttaccaaatatcatatacacataacacatgcagacatacaaacacacagaagtagattttacagctcacaaaggatctttatttgcaggcttttaaatcgttttttttccccattcagtctatcaatctttcaattacctgttttattgctgtaagcaattgctaactaggcaacaaatttgcatttctaaagggacagctcttaggtagaaaaaattacatttcattagttcagagctgagatattaggcctaagtattgtgtcattatttgctcaaagaaaaggcaaaaacaattgtccaaataaaagttcacttaagacaagatggccaaaaaatcaccttaaacaaagctatgacttattttgtaaatttaaaaggctggtaagaatttctaatgtacataggcagacatcttttaaaatggagattttctttatagatgtaaatttgttttacaaaagggtgtcaagacaatcaattaaattccataaaagtgtattttagtttaatatggtgttcatttttacttagctactgttttatttttgtttatttgcttgtttctttttgtttagctaaaattactgatttcaggatgaagttcattaaggaataggcccaagaaaccatttttccttcctagactcagcatggatatattgataaaagaatcaagccaatttttttcaaggacctatcttttataaaggctttgccaaagatatatttctttccactttggggacaggatggtaactaagccaaaaggtagcagatttcattttatctattaattggtcacttaagctttttatctgccttttaaagtctttaaataaaaatacggaaatctttttagaagctgctgcatatcaataggcatccctagatgaggcaaatttgggagccataattttcaactgcacttcagagcagtggtgttcatttggaatgtcccactgtaactaacctctaccaagatttcaccatttctgtaaaactttccttcttctggtgcctaatatttatgtatgtataacccagaagaaacacagttcttcaaaaatttaggatcccatttttaactcaaatattggctttggctctcagattccctcgatctaattagccaataattttttccctacataaacacacaaaacattaaacaaaggatgtagagcacaaaaatctttacgggtttccaaaagccgaattttacatgtcttgtaatatttccatttattaccagtttctttctgaccaagtcagacttaagagccttgtaactggatccaatccagttaattaccagatctgatcctggacccagtccagtttctgtcattactcccaaacccagttttgtcattactcccaaacccagttttgatcataaatatgttcaaagaaacttggagagctcaaaacacaaatctgtggagctttgaaatccaagagaacttaccgtgatccccagctacctggggaaagcagtggacgcagtggggttggtgggtacctcgcgtggtcgctcagcactcatttgagttgttagacactgtactccagatcctacttctgacatcatctgttaaaataaaagccttaggtgatttaatttaagactttaattgtgcaaagaataatttgcaaattgggcagcctctggagccagagtaggctcagggaccgcagtgcagccacctggtgaaacatttatggacagaaaaaggaaagtaatgtacataatatggaaatgaggtacagaaacagccaaattgattacagcttggcgtttgccttatttgaacatggtttgcacagctggtcacctttgattggccaaaactcagtaattagcacaagtgtaggctacagcctgttgacaatttcatttaggatatatagttcacaatgtacagagaaacctttaggctaaacttaaaatatgtaaggaggtaactttaggctaaacttgatttaacaaagtgtacaccatggtgaatacaaaattaggtatgataagaaacaattatttagaatgagaaaaagtaacaaattacaaataaatttgtacaaagcttacaaatcccataaacagaaaaatccatacagataaacgtttctgaattaacttcctgaaacaaagctatagcattttgttttaacttttttgctgccttcttttagattactttatcatgtgacaatttttaaatatgttctgtagagagggttaataggaactttcattttctatcaaggttaatcacaatgtatttctcactgatcacttacataaattaggttcaggcttatttctttttattcaaatttattttatttcatattcattcatccaaattttagtgtttttttaatttagaaaaaaaactcctgtctagttaacattttatatgagctgtaagatgtgacagaattttttgaagactagtttcttgtgtctttcaaaaaaaatttttttttctttctctattcctgacattattctagagacaggttctgaagggcatgttcccatgtgatgtaacctcttgccctgcacatttagtcacagcgtcaccgcagagggcaaaaaagtatattccttggaggatattacaatggggtggccatcaatatcagtatcaatctagagggaagtcactccaaaaccgcatgaaaatatcccactgaacccaactaaatagatcttcaactcatgttccccttaacccagatcctgtaactgaactcaggttcagctgctctctactcaaaagctcaaaagccaaaactaaagagacaagagtaagtgagaggaaaagcaggtctgttcatgagcccacaaccccaggagatggcagatttgcatcacagagaccatctctcatttatcattctggccaaaggggattcataggcaaggggcttgagaaactgtgtgcagaattttgctatgtgtaggtcagcaggtgttgttccaatgattatcttgagtaatgggccatcatctagcggtctggcaggcatcagtgagactgcagcatgattgaagattaactgctcagcatttttccagggttggatattttacatttcacagccctggctttatttcaaggttaattgtcagagttcgtaagcaagcacacagttaggcattgtgaaatgaggaacgactatttacttctaagaagggagtgactcccttggttacaatctcaacaattatcttggccactacaaacactgcatagaaaacgagagaggaaagaagagaaggagagaaaggggatgctgcagaagagagatagggtgattgtatcagtcggagttctccacagaaggagaatcgatagattatttatatatatataaaatatatgtgctgcaaatatgtagttaaaatatgtagtattttatatttttgaaagtattctgtatttataaaattgtgtaaaaatgtataatattttacaaacatataaaatattcatttattattgttattgataaatagacatgaaacaatgatattttatatgaaaagccatattttatgtttatacatcaaaatatatataataaaatataatacttcatatgtataaatatagatatatatgtacttgtgtatacttatgaatatataaaagtatacaaaaacacacacatgttaattttattttaccagactgacacatttgtgaatgctgacaagttggttatttataggacacaggctgaaaactcaagcaagagtcgatgttgtgttcttgaggcagaatttcttttctaggaaaactcagtttttgctcttaaagcattcagctaattggatgagacctacccacattatcaagagtgatctcctttacttaaagtaatctgattgtagataataacatctacaaattaccttcacagcaaagcctagaattgtattcaattaaaaaactagttactatagcctagaaaagtttgcacatgaaattaatttatacatgcaaagtttataaaaagttacgacactataaagatgttgctataccctaatgataaatttgttactctttcttatggattttgcagagtagcaagtgcagaacaatgctggctagtttactgaaaatcattatgtatcgaggtaaaatttttaccgaataggggaaaatcctgtgttgtgttgttgtgggggtggggatcaacactggcatacttgttgggaaaacagacagttaggtaccagggcaaatgatgcttttggcaccgaacccctatgttttagaaattggaactacattcacctatgagcagcagtgcacggctactatcttagaactgccttggtggctgcttgtacctacctactcaatcaaggagtcctagtatttcaaaaagctcctgttaaataatcacacaaaaatacaaaggacaagactgaaagaccctgagtcattggagatggcaaagttttgatgactcacattatgtcttacctaacatttgttttttatatatctaactcattttacagcttaactcttcttttaaaaacttttttaaaatttgggattatgcaatgattaataactaagaggttaaactcatgatcctaatattcaagaattaacgtgtgtatgaggaggtagagggaaagatagaagcaacaagcagtaacataacagaaaatatatattttttagcaaagaaaatttatagtaggcaaactaacttcagggctgttgaaagagggattgatttttaaaaacacaaaatcctcataggattgagaaaaagtttttaaatatcaatttacattaaataagaattttgcaatatagtacaaaaaagaaatctaaagccttattctgttactgtagctagcttatactttggaagaaagaaaagaaatcaaatgtatttatttaatcctttttgtcagtgatacccagggtgaagaattcatctgtagctttttcactgctgagttgagtctcagaacttcacatatattaaagtaaaatgttttaccttctgatccgaagcctttaagatacagttcatttctatttataaaaagaaggaggtttatgtaatttaaatttcatggaaattgtctaagactacctcagttagcaaaataaagcttttatttactactttttgttcttagaacgtatcaactcaattttcaaaattttgtatgattcacatttcctttcacattgagttacagaaggtaaataagtcattaaaagtctaatatgttttcataaacatttagaagaatgtattacaacagctagagaaaatagatttgcaatttcctctaagttccaatgcagtcactgagttaacatgtactttttagttaaatgatgatcatctggagaagcaaatatatatgtgcctttaaagtgttctacttctgaaaaggcagatagacattatgaaatggaaaaataactcaataaaaagataccacatattaataatttcattatttggttttaataaaaatttcagaaacctggattattgatggagagtcaaaaccaaggagggaagaatatgctacagtgtggaggaatctttaaaatgctatactaagtgaaagaagccaggtatgaaggttacatgttgtgtgaatccatttctggagaatgtccagaataggcaaatgagtagagaatgaagattgttttcaagggaagaagagagacctgaaagaagccaggcatgaaggttacatgttgtgtgaatccatttctggagaacgtccagaataggcaaatgcgtagagaacggagattgttttcaagggaagaatagagacccgaaagactagcaccagcaagtaaatgcttctccatggaaatgacacatatctattcatatacacatagagctatttggcagtacagagcaagtaacatggctttacctacctttcaggaactatgaaaatgcagatatttcatgttctcagaaggaagagaaccagacatcatgataaacagaactagattctaaaacaatatacttttctttattttaaacttggagccaggatcatgtgttacctaaccaaaataatattttatttaaaaatacagtttgatcaaaaagaaagaaatgaagttagacaaataattactgaaaataatcagtttataagatattatgttaaaaatgaagggttttataaaatctctagctttctatcacctctgtgcattattttctagcatgcagtgaataatgctgaaaaatagacataaataaataaactggttatctttcagtaatggaaacatgaactattcttattgtattcgtgtactcttctagaggtttttttcataatttttctaaagtacatatttatgctaagaagtaaaatactaaatacaattttaatgtgattatcatttttgaatggcatatccagttttgtactgctacactagaattttgatcccatacataatattttgcaatcactgttaatacttaaaaagaagaatgactgtagtatcctcttaaaataatatacatgaaatcgcaatgataatatggttgaaatcttttatggccaaataacaatgcaatcccgtgtggatatattggtaatcatctaatacatatttacattatgatgggtatttttgtttttttcaatgcatttgaaattatgtattttttagatataaagcaatagacagtagaggatagagtagtagaggatagagtagtatataggattgaaagcagaaggagctgttattactccaggcctgaaagaacaagtggaaagacttgtaccagaacctagaaggatagacacctgtaaaagaggtcattttgagagaagcaatgatgttcagtctagggacccagccagcccatagagttgggttatggatcaacccagaacaataaacactctgacattcgcatgcatcctctgtccggtctccctgtggggcttttattgtttggatataactagaaaaggcatagaagtcggaagttgtcgcataggtcaggcttctgtgtgagagggtggaatgggcaagtgaactgggaggagcacacagagctatctgaaagatggacgctcactaaattatactttgagagtgatgtggtttggctctgtgttctcacaaaatctcatctggaattgtaatccctgtgtgtcaagggagagacctgtaatcccgaatggagggagaaagggtgattggatcatggaggcagttttccccatgctgttctcgtgttagtgagtgagttctcaggaggtctgatggatttataaggggctcttccccttcattctcactctttctctcctgctgccttgtgaagatgcctcctgcttccccttcaccttctgccaagatggtcaatttcttgagacctccccatccattcacaactgtgagtcaattaaacgtcttttctttattatgactcagtctcaggaatttctttatagcaatgtgaaaagcaacgaatacagagaggtactactgtatagagattttattaatttttttattttttattatttttttttgagatggagtctcactctgtcacccaggcttgagtgcagtggcataatctcagctcactgcaacctccgcctcccaggttcaagcgatcctcctgcctcagcctcctgagtagctggcactagaagcacacaccaccatgccaaattaatttttgtatttttagtagagacagagtttcacgatgttggccaggctggtcttgaactcttgaccttgtgatcagcccacctcattcttccaaagtgctgggattacaggtgtgagagggagaaaaaggtataattttttcaaagcaatcgtagtcagaaaaaaagttgaaatgacaatgtattggtaagaaattataagttttttctggggaaaattatttgggaataaaaatactgaaaaatgaagagatttatcatgctctatgcatctatttacagattaggtccattattttattctttcacctgtaaattcagaatgagagaagcacaaaatctaatctgtacattaaaaaagagactggcaaatgtgaaagagacaaataatcccttttctctggtgaattataagcaattataacatttagtgacaatttctttatacattaaagctgtgtgaaatttattttactcaagtaagtaggcccaatttaagggatgattttagagaagaacaagagataagacatagattaagtaaccatttagagagtttaaatgtggaggctatgcactttgtatgtagagcataatttgtttctttgcttgcattaattgtggcagattgcttgttgaactgcccagactcattctccctttctgttgtgcagaggtgttttggggagtggtccacctgccaggcacgacatttaccagctcccagtgaaacagtaattacatgttggggagtggatggaagaatagtgtgtgtcactgaggggctaaaatggtgactgcaatctcccaagggttcttttggttcttgtcaaacttctggcagcagtgaatatcggagaggaatctgaggacctgcgccatgtagagccattacgtacaaataacatgaatctcggagtcacctcttagtggaaagttgtccagggagatcaccttaccaaaaatattaacattttatttattatgacaaagaaaagcgtgccgtgttaatgcacctgaaagttggggattatttgttgcattagctaatactaattattctgtctaaaatggtagctggtgttaatcaaaatagagaatggggaaaaaaaagaaagggaaccaaaaaaaaaatagtcagcaacgagtccaaacaaagtcagtgttaacatatataggtatatattaaataaatatatatggcatatatacttaatgtccattaaaatgtatataataaagtgtagagatctcatttgcagcttaactaatttttacatatgtgtatacctgtcttctgcatgcagcctgttggtaaaatcattcaaggggtttgatttttttatcagatattgtattttactgttttataatgacgtttggttctgtttttaaagattcccatttccggttgtaattcttgtcttttcattcacttgtctgtcatttatattattgaatatatagaacatattaagaaatttttattatatttccttcactattttgattattgttctgcttctatttgtaattggttacctttcacttccctttttgaatgtctggttatttttaaaagaactatagaggctccagaaagtgttttttttgtttttttgttttggtttttgtttgtttgtttttttcaaagagggctttccttttcccatgtagagagacaggataaataactgataagacaaataagacaagaaatgcatttgttgtccctgggctgcaaatttcataagactcaatctaacactggtcggtttttgttcttggggcatattcttggaaaatctcaagctttgggttgaaagcctattatgttttttcctcaactttgaaagcctgggaaatcctgatctacagaagttaccagtttcactcacccatctcttgctcctgaggcgtctaaagatggcagacgcctcaaagacaaaatgaactgtatttggaagcaaaccccatttctctaagggaaattgccctaagtactacaagattataggagcttactattcagcttactagctccccagtcacctgcaggcaggtcaagattcagaatctgcccactggagaaaactggctatattcgagtattctcaagtttcctgtttcccctttcccctatcagccctgaaccaatttcaaaagattgacaattttttttttttacctttgagttcctctgcataaatcattcctcacccagagccaagcccaaatgtggttccagagcaaaatcagcatttgccaccaagaaaaataatagccactgatagggtagttagctcaccaaagaagagtttcctgtcttgaaatttcaattctattttacttttgcttccattgctctttagtttctttaaaatgataatttttataatactttgagctttttgtaattgttacaattgaactgttaagatcataacgtttacatgtaatttatacacaaacacaaatatatgaattaagtgtttaaatgtgttttagcaatcatatgtatacaataaaatagaagcaggaggcctccatagaagcagggagacacaacagaagctatatatatatgtatacatatacttccacattaaagtacataccttttcaaaagggagagctggtcttttaaattattaatacatttatggagatcctgtaacatttccagtggcttccttgcacatttaaatagatcaaaaattcttcctaggggttaaaatagtatatcatctgattacaaactgatattctgattttataatttctaaaagttggagcacaacttttggaaattacctattcattaaaaagaagtttctgtcttcagattttcctatcatagggtctaccacccgatctaatgctgcaatgtccctatctctctcctgccacttttacacttacctcacatacattgaccattttcttatccttgaaaatgtcaagcttattttcatcccagttcttgatcagtctcacataactatttgtctaggattattgaagtggcaagttactccacattatttaaaaaccaaatgaaatgccacatccacagagaagctctccctgaacactttccttaaattagcctcttctcatcatgctcaactataacactatttcacttcctttatagtattcattcctatctgaggctcactcacttatttatccattcaccattgcatactttccaacataagaaacgttacaataaagtttcttgcatctttttctttgccatttatcaaattatttctagagcatgtatttgccacacatcaacttgtatattaaagtctatgctgcattttttctttcactcattttgctatcctttcacagaaagattttactaacgtgtgtctataccaacagtatgtgtgctacagtttgaatgcttgtgttcctccaaaattcattttgaaacagaatctctaatgcagtagtattaacaggtggggctttttaggaggttatcaagtcatgagtgctcttctctctgaatgcgattaatgcccttattgaagaaagaggcttcacaccgtgttcagccctgtagcccttttgtccctgccaccatgtgaggacacagggttcctcccctctggaggatgcagcaacaaggaaccatcttggaagcagagaacagccttcactagacactgaacgtgcaggtgtcttggtcttagactttccagcctccagaactgtgagaaataaatttctattgcatataaattattcagtctgtggcaatttgttacagcagcacgaacgggctaagaaatatgaatgttcagtaaactaactaaatataatacaatgaaaataatacaaaaatatgtactatttttataaaatgtcttgatctttagtatttcataattgaatattttttgatatttatataaatacaaacaaatttgaatttgtctgatttcacaattttttatatcactcaacatttttcaatgtagtatagaatattttacatatgtacacagatctatatttacacatcccagactcacattcaaaatgcattctatgttgagcaaattattcaaattcaaacccatacatagaggtaatattggctaaaataaaaataattttgtagtttcaaaatacttctgaaataaatttaattcaataacagaaatgaatcattatttccttagcttgattaaagaggtatcaaagagcttatttcattttaattccagaaaatttagtgattactgaggaatgttcttgacatatgcagtttttatacaaatgttgacttatgagtggcatatttaatattttggcctctctttattacttctcatcattatgattttgaaaaattccctaatggggcataaatttgctagtgtctgtcaatacgaaaaacagtcattaaacaataacaaaggccatgactttccctcttctcaactatcatatctcctaaacagaaatttgatgcagctgatatatttgtattaataacatctgctgctttcatcattaaattctacccaccggttaatgcctggagctgcaaaattatgagaattagctgaaggagtctcaaattaaagaataaaatgaaaactttgaaaacatgtattgccacctataatacttcatagtgggcaaaataacagcctccaaccatacatggaatgcatcacacttcttaatagtggtggaaatttaaataaatgaaaattattggagaaaagttcagtttatattgttgggttaagactagagaataaaaaaataagcttcagaaatgtgatgaagttaattcaatgtctgaatccaagatagaaagcctcatttctgagaaactgtatatctgactatgtgtaatattaggtcgtttgtaattaaggaatatttaaagtaaatttaaacattaaatgcaggtaacaatctaacatatacatcataaatatgaaaatgattctttaggcctgtttaacattataatgtaaagattacagaaaaatgaatatactaggagggatataagtaggtacccataaagattatattccagggatatctttggttttaaagtccctttgtactataaagtaacaaaataaaaaaaactatatcttctccctcatgtcagtcactgaggacattcttgctgactttatttgttcactttaggattttccttgaaatcaggttgtgttgtacatgattgccataaattgatcataatcactcctgcattatctaatgtgggtctacgtacataagataagaatctacctctaggttttggaaacttggttgggagaatttctatgtaaaattcctttgtttacatgcctggctaattctttgctttgttctcatctagagattgctagattcttttgttcacttagactatgatcttcattttcagaattcataatgccattcagttgatccgtgcattcccttcccaacattatattttagcagcatgctccatgacacttcaacgctctcaatgttttggttaagtggcttgtagctccttgtcataataatttgaaacatttgccttcatttggaaacatttttaataaatatataacaaatcatagattattttttagaactttgaaaattactaaaatagtaaatctccaattttccaactgtaaattaaattattttgtgatatacagcttcattataatacactacatattttaaaaatctgtctcattataaaagtgtcaatttccaatgatgctgttgattaaagaaatttaacattttatctgaatactacaggatttaaattgtttgctaatatatatagggttcatagagtgttaagacatataatgattcatcaagcaaaaattaattcaggatctaaaatcaatggcaggcttaatgctttttaaaatagataacactgttttaattaaaaatgtcagcaatgtaattactccttaagcaaaaggccacagaggggaaaattgaataatacttaagttgagcatatgaaaaaattaatttgtgttaaaaagtagcaattagacatttccttggcagcatgagagatcataatctcaagtcttgtgctcatttgcaaaatataacttattagatttagtttaaagaaaaatagtatatttttaaaactgtagaaaatagcagtggttacaaaatccaaaaattcatcttatcttaaaatatttctgggatatttcagatttcatttgaccctttaaatcttttgcttcttctttcctgtagtaagtcaggactaaaatttcagtcacactaaaattttaacatttctacattattttgaatttcttagttaattgccaaaatatgtacttcttgatatctgaaaaaaccgatcacttaagattggtcagtttgggagtggatgtgtagtttgtttacagggatcttgaagaggctcaatttgaaattctgaggaatgccagcaatgagaagacagtcagagaaagaggattcagtgaagacacttgagaaagaatgttcagaaaattaggagtaaaaaccttgatgtcttggaaatataaataaaaagaaaagataatcacattgtaagaagacatgccaaaggtataaaatgcttcagagagattaagaattaaaatatacccatttgattgagcaatcagtaggtttatgggggtcacatttatgagtcatctagtgaaaaggtaaaagtaaatgcctaaatgaaataagtgaaaaaagctgatgaggtgatgaactggattataaattgtggtttggaaaacctcatttggatagattagccacatgaatgtaagcaaggaagcagagaagtaagtcctggagaaggaggggtatacgattgggtgattttatgcttcatgtcatctataatttatctgttcagaagcaagtatgattcctgatagagagaaaatatgagtggtaggagatacctgtctgggaaaagaggcatgtaagatggctggattaaagctttgagatcatttaccttgagtaaaattatgaattaaaataaattacacagagcttataattttcaagaataacggatcgaaaaaaaaaaagcaacaggcatgtccaggtgcttatctgacacatttctctgtatcaaaatctacttgcatactaaattatatagctctttaaataaagagttaaagccatcactcagctatgccgagaacctcagaagtactagggcttggcttctgagagtggttagagcccaagtcataatgaggaggcaccagtttaacatttgcttaaggaggaggcagtgcatttggtctcagatatttgcacgtggtactggatgaccagtaaagggatgttataactggtggttctttgactacagaagaccatctattcattctcattaaggggtggcaggtgtgttttaatgaatgtctgcagcaagatagactgatgatatcactgggagttgggcagagaatcaagacagtgagatttaaagcacaagaaggattcactatgccatcaatggcttgacaatggaggctatgaacatgatatgaaatgtagacgaagtctagaaattgaggagatggctacttttgtggcttatatttacactggctgcattagtaactattttagaaggtctatgtgtcctactaagtgctattgttcttcacacattgtgtaagaaaaattaaatcttcatgagaaaattggaaatgtattaagttgtcaagagtcacaatgttggtccttcaggcttcaaaagaacaggagatatagaccttgagcaaaatatctcacaaaccagttgatcaagtttgatgtttgttgaaacctttgtggtcactgtgactttgataatctttgtggtgagaccttcccatggacacagacatttataaaacaatatgctctataactggagcatttccagtatcctgttttaaagtcctgggtattgttattaaattgctttttgtttgaaagactgtgctggaattcctttgcttgaattcttcttctaagctttatagtctgtgtaagcacacagattaattctctattacggccctggatatatgcaatgcatctatggtgattctattatatttatgtatttttataccaccagttttaactagttctcttcttctacttaaagagtgacgaaatatgcctgctgattgatgatagtttgagtgtctacaattttgtgggaaaaaatatctgtaatatttttgggcttttaaaggtgtcagttttcatctaccaagtcagcctctgtcttttccaaagatgagaaagcaatgaatgatgaactctctaataagcatgcaattcttaataataatgaagaaaatttaacccaggtaattgcatagcaaacagtagaaaaccccctagagaaatgaaaatccaatgcctttatgaagaaaaatatgtaaaacttaatctgtaattttgcaactaaatgaatttgaatatcaaatgtatctgaaaatgcatcttcctgtgttaaccagaattagaattgtaagatgtttcctgtgacatttactcccaggtatcagtcctatgactatgttacgctacatgccaagagactttgcaaatgtaggtgagattaaggagctgattataaaatagagaaagtattcaagtatagctaacctaatcacatgagcccttttagagcagagttttcacactgctgacagaagatgaagtcagagagatttgaagcacaagaaggctgttaccatgtacttgctggctttaaaaatggagggagttatatgagaaggattgcaggtggtatctagaaactgaaaacagcccttggatacaacaagaaactgaatttggccagcaacctgaatgagcttggaagggaattcctccccagaaactcctgataagagctcagctcaaccaagaccttgactgtagtttgtaagaaactaaacagagaccaagctgaacctatctggacttgtgaccttcagaaactgtcatataataaatggatgtagttttaagtaattcacaactaatttaatggtaatttgttactcaccaaaggaaaactaaaccagttcctcaaataacatactcgaaagacaatcattttaagttatcattaatttaaaacaagaacaattctctcttatatttacacaacagtgtgtcaacaaaaatgaccttagctgatggctggcttttatttctgttagcattcatattttcaatgtcaactctttcactaaaaactaaatgcactaaagacaattttaagaataaacaaacaagtaatttatttcttcattgctgaaatgaaaatcgtaaaattttgaaatgcactagtatggtaggcctctttattgttaaatttgcattttatttggtattaaaacattaagacaggctgggcgctatggcttatgcctgtaatctcaggactttgggaggccaaggcaggtagatcacttcatgtcaggagttcaagaccagcatggccaacatggtgaaaccccatctctactaaaaatacaaaaattagctaggcgtggtgttgcgtacctataataccatctactcaggaggctgaggcaggagaatcacttgaacacacgatgcagaggttgcagtgagccgtgattgcgccactgcactccagcctgggtaacagactgagactctgtcacgaaaaaaaaaaagcccttaaaacagaaacctttacgtccactgtagtatgagactgtattatttggccaaaattatttctattttcttcaatcctgctatgacttccctgtgggttgatatgactttcacatactccactgatgaaatatgagacttatttggccaatggaagaaggacagaagtgaaaatcaaccagttctaagattattccttaagaagcataacaagtttcccctcatccttttggagcttttactgtcttcaatgagcaagcaggccccaggcgaatattgtaaaataatttaattgcagtattaggattgatacttctaacagttaagaaatgggaaatgcactggcacatttgtctgtttttcttttaaataagagtctgaattatgcctaatccttaagttcaaattttagaaatactgtttttacatagactaagatgtatctagaccttcgaagatgagtatgtctaagttttaggcgtttctcttaagtcgatcaatatactataggcctttaaaatataaaaatattttatttttaaaagtcttttttaagtcaatacgtgttaccttcgttaaatcaagatgagcctaaaggtgtcccgttgcatagtttaagtttagcctaaaggtttttctgtacatcatcaactataacaaatggaggtgtaaccagactgcagcctacacttgtgccaatcactgagttttggacagtcaaatgtagtcaattgtttgaaccttgttcaaataaggcaaatgccaagttgtaaccaatccacctgtttctgtacctcatgtctgttttctctacatttctttcctttctctgtccataaatcttattccactttgtggctacacgggagtctctgagcctactctggttgagaaggctgccccattcacgaatcattcaatgctcaattaaactcctttacatttaatttgactgaagtttttcttttatcatcttctttgaaccactgaggttttcttctaaaacatgatgatatacacaaaattatcttattaatgatgtgcatgtttgaattcaaacaacaaatggttttccctattttgagcatctagctttgtggaagatatatagtcccattatataatagagctaccttgtaccaggacagagaaatgtctttgaataatatatcaaagagtgggctctgcctcattgcctaagtaatcaatttcacggtaagactagtcagctttacagatgagtgtaatgcatgggaaaggttcagaaatatattattatatctacttgagaaaaatacatctttgagtacagtacttaaactaaaaattttacaatgcataatgggaaacaaagtgcattggaggctaagtggaaagaattgatgttcatctttaagcatagggaaaaaaattttaaagtcctacctgtttgatacttgaatttttccttgaaactttcctgagattttaaataggcccataacattctgctcttaaagataggagagaaaaaattttactgtaatacttactctatgaggcacaaattgaaaatattttgtaatatcgaagatataaaccttttgtatgtcattaaaaataaaaataagaatgcatgaaaagagttgataatttttatagtatatgaaaatacaatttatagcaatgaaacaaagtttttctagcgacatttcagaagattattttaaatatattctgttgatattatttattactattatattaagaaaaaatgcttttacatttaacaataccaaaatgtgaagttttataaatacatattttttaaaaaatactagtttctatatattcacataaaggaaaaacatacagatttttaaaaattctgtgattttaaattttcaaaatgttcatattagcagaaacctccaatgcaattattatatatgtgcaaattcttatttatataaacatatatttacttatctgtgttgaaaaatctttaaacattttaatcactactttaaaaataacactcttttttcttgtatagctattataataaaaaattttaacatataatcagttttcattcttggatcacagaatcaagtatgattcttttaattgagtggtatatggaaaacttagagaaacaaacatcctcataagcgaaggtggatttttatttacaaattctgcataaatccattgtcttttagaacaatcttcatgggtcacaaacaaaaacatgttctcaaaacatgaagcattaccactttagcatttctcttacaaatagagagaaacttatacccagctctttttatttatttatttatttttgcatagttatttcaaatattttaagtttagtcttgcttctatttaaccatgtatttaaaatatgtatatgaatttttctctaagatatctacatgaatttttttttttacttaataatacaaaatttctcaccatctcccttaatcacattgaactaatcagaaactaatttaataacaaatatgatgccctgtagtaaaattctgtgttttagacagttcaggttgctataactgatatataatgggctacatagactaggtggcttaaaacacacatgcatttctcacagttccagaggctggaaagtcccagattaaggtgacagctgaactggtgtctgttgagggcctgttccctaatttgcagatggcagagaaaatctcacagggcagagaagagtctctttttataagggtactaaatccattcttgaggacacaacaagacctaactatcaggctcatgacctaatttcctcctaaaggtctcacctccaaatatcatcacattggtgattaggccttcaatatatgacatttgggggtggacacaaacattcagtccatagcacttcaaataacagaacagattagaacggcatcttcggatatcttatcattcgtgatctaacagtgaatttagggtatgaaacagaaatatggttatttctctgcctttctctgccttttctaaaaaaaaatagacaatcctgtcttacaggtttttagaaagtgttgaaaataattttttttcactcgttcacacattgtataactaagaatgattacaaatcttcacccaagaatgaaggagttctatttttaaagtaggtttaactttttaagaaggagtaacagtttgctaagtatctctttaacaaatctaattaaccccgctttcatctaactcatgtttggcgttccctgagtatttttgttctaaatcaacaaaattattaaattattttgaatgtataatttgaattccaatataataaaaaaaaacataactgtgttgtaaaatgccctgagatgtttgtgatgagataggtggctgtaagtgctgtgatagaataagttaattttattttgcataaataaaagtaagtaaccttaggggttttgaatagccatatttaatgctacatcttgggtaatacccagctttgcatgtatctgcatatatctatacatgttgaaaactccatttattgaaaataattgatctttaagaaacttttggataactatagaaaatcagtattttaacatatgtcagcacacttcaggagatacaatactattgtttaaggttttattggcattgtcattaaataaatgtaacataataaagtggtaaaaagttaaatgatatattaaataccataaagtgttaggggaattagagatcatttaaccataaaagagcaaagaaactttcatagaaggtgtatatattgaattttacttccatagacgggtaggatttagaatattgaagaggaaggcaagggacattcaagataatagcataatctaacataaacgaaaaaagaatttgatgtgtaaataaaatgacatgacaaaaaaattggaaacctcaataccatcaaaacaaagtggatatgccacattggattatagtaagttttagtagaaaacagtaaattttgtaattatatgatttccctctcttttctggtgagagttactgcatcatctttgcctgagacacacacaaaaataaatgagtcagatatattcaaaggttctgtgacctggacaaagtaatttgcttatagagagaaaagtggacacaagatgtcaatcagtgtccattaataatttttaatgcttgaaaagaaacaactgctgagatttctagagacagaaatattgttctggacagatggaattactatttagcttggctttgtcatcttaactttaacactgtacataaattcctttaagcccagatttctgcatgaaaaaaactaaaataaagtaaaatgtaatccagagatggagaaaaagaaaggcagaaaaacgacataattttagtatcaaaatttatccttgactgacttttaattaggtaggtccccaaatttccttcttgcttacattgtttttttaactacaattttaaaaataaacaagctttacatttggaaggttatagatgtaggcaaatatttggcaacagtggtgaaatgtgtgtaatgtgcttaatcagtcagtaatacttacaaatcagtatttagcatttttcagtatttcaacataaacattcaggaatgtgctttatacttatacttcccaggcacctagctgtgtatcttctgatatagtttggtactgtgtccccacccaaatctcatctcaaattgttattgccataattcccacatgtcaagagaagaacataggggaggtgataagattatggggggcagtttcccccatgcttttctcatgatactgaaggagttctcacgagatcttatagttttgtaagcgtttgacagttcctcctttgctcctctctcttgtctgccaccatgttagacatgcctgctttcccttcagctatgattgtcagtttcctgaagcctccccagccatgcagaactgtgagtcaattaaaactctttcctggctgggcgtggtggctcacgcctgtaatcccagcattttgggaggccaaagcaggtggatcacaaggtcaagagattgagaccatcctggctaacacagtgaaatcctgtctctgctaaaaatacaaaaaaattagccaggtgtggtggcaggcacctgtagtcccagctatccaggaggctgaggcaggagaatggcatgaactcaggaagtggagcttgcagtgtgctgagatcacgccactgcactccagcctgggtgacagagcagagcgagactccgtctcaaaaaaaaaaaacaaaaacaaaaaaaacaaaacactttcttttgtaaatttcccagtattgggcagttctttatagcactgtgagaatgaacaatacagtagagtggggtactgtactgctataaagataacccaaaaatgtggaagtgaccttggaactgggttatgagaagagattggaacagtttggagggctcagaagaaggcaggaggatatgggaaaatttggaatgttctaaatacttattgaatggctttgaccaaaatgctgacaatgacatggaaaatgaagtccaggctgagctggtctgcattggagatgaggaacttcttgggtactagagtaaaggccactcttgctatgctttagcaaagaaactggcagcattttgtccctgccctagagacttgcagaacttgaaacttgagagagatgacgtagggtatctggaggaagacatttctaagcaggaaaagcattcaaaaacatcatagagtgtaaaagtttggaaaatttgtagcctgacgatgtggtgaaacaacaacaacaaaaactattgtctggggagaaattcaagctaaatgtgaaaatttgcataagtaaagaggagcagaatgttaatcgccaagataatgaggaatatgtctccagggcatgtcagagatcatcatggcagtccctcccatcacaggcccagagacccaggagggaaaaatggttttgtgggccaggcccaggactctgctgctctgtgcagccttgggacttggtgccctgtgtcccagccattccagctccagtcatgactaaaaggaaccaaggtacagctccggatgtcacttcagagagttgaaccctcaagcttttgtggcttccactttgttttgggcctgtaagtgcacagaagtcaataattgaggtatgggaacctctgcctagatttcagagaatatatgaaaacacttgaatgtccaggcagaagtctgctgcagaggtggagcccttgtggataacctctgctagggcagtgtagaacagaaatgtggagttggaactcccacacagagtctccactggggcaccgtttagtggagctgtgagaagagagtcactgtcctccaggcctcagaatggtagatccactgatagcttgtaccttgagcctggaaaagccacaggcactccatgccagcctgtgaaagcagccatgggggctgaaccctgcaaagccacagaggcaaagctgcccaaggccatgggatccaccctttgaatcagcatgccctggatgtgagacgtggagccaaagaagattatttcagagttttaagattccatgactgccccactaaattttggactagtatggggcctgtagcccctttgttttggccaatttctcccatttgaaatggcatgatttactcaatgaatgtatccccattgtgttttggaagtaactaactgcttttgattttacaggatcctaggcagaagggagttgccttgtctcagatgagactttggacttggacttttgagttaatgctggaatgagttaagacttcgggaaactgttggaaaggcataattgtgttttgaaatgtaaaaagtatgtgagattttgaggggatgggggagaatgatatggtttggctctgtgtcccaactcaaatctcatctcaaattataatccgcataatccccacatgtcaagggaggtatctggtgggagaattgaatcatagaggtggattcccccatgctgttctcgtgatagtaagtgagttctcccaagatctcatggttttttaaatatttgacaattcctccctcacactgtctctctcttctgctgccatataagacatgcctgcctccccttcctccttaattgtaagtttcctgaggccccatgcagaactgtgaatcagttaaacctcttttctatataaatgacccagtgttgggcagttctttaacaatagtttgagaatggactaatacaacttcctagtatatagaaagtggtaaaccaatatttgtgaaataaatgaggaattcaatggtcattctattaagaacaaatgaaatatatcttaatttccttgctcaatgaagtgtttatatgtttgtcttctttccttatttcttccacttctctcttgattgttttcatcctagtgttgaagttttagacaatttagtaccataatttgaatgaagaaataatactatagatgctatatatgacaaagaaaatattatcttagtgtgtatgttggatcaaaaaattagacccaatagaatagaaagactatccattctatagaatattggtatggaaaaaattaaaaaataaatttgcttatttgtctggtagatctccaagtgcttaattatcaaaccaaagaataaatctttattttgcagaaaacagaaagtaactggcaggttatggagcagaataatgacataatcaaaaaaatgcttttggaagatcagtcttaaagcctttgttagaaaatggagagagagagagaatatgtgtgcatgcgtgtgcatgtgtgtttgtgtgtgtgtgtgcgtgtgtgtgcgtgtgtggtgagaaaggtactttgtagtttcaggagtagcctagacatattggtataatttccctgttagtttaggctaagttcaagggctgtacatttatttttttctttgaatttctttggtgcaatatcaaagtgtgtaatcagtaaaggtgatgattggattggcctatgaaaggcactttaaaggtctgcatgttagaagtctggtcaagctcagctggaaactccactaaggaactttcacaattcaaatcaatcatctttcagactcctaatctgatgtcatctgctcattagggttgttggcagaattcatggctttatggttggagaattgaggtttttgtttctgttctggttgtcagccagagacaactctagtggtataggccaactgcatttctgatcaaatggtcacctccatctctggccagaagcagtgtgttgaactcctcttaatgcttcaaatctttcttacttcctctgctgccagcctgagaagatgctctgctttgtaagggtacatgtgattacattagatcagctagggcaatttccctctctaaaggtcaacaagttaacaattttaactacatctgccaaatccccttttctacataatataaataatcacagggcagaagttacacaggccatcttaagattctgcctgatgcaaggaaaatgctgttcagattcatttaatagcagaattacagtttaacttttaaaatatttttaacaaaaactcatatttccatttcttccaaagttgttttcattgattatttgttcaattccaagttacattttctttatttttcttaagaattgcatatatattaaaaagatttctattcattggttctcatctttaaaaaaaaaaacacaggcaaacttgctaaatgaaaactctcatctttataagcataaatatatcctttcaatgattgctagaaaactatccaagtgtaaaaccatcatgaatgagcataatttgctactccttaaaaagaatagttgaactagttaaaagtgacatttaaaaaatacataaaaaaatttatgaaccactcttttataattcatttgtttataaaatatgaataatatattgttttcagtcctcagttaaaccagtatatttggtcatttaaaaaacacagttctttagtaagactgtaaatggtatctgcaggtatagacagcttcaaatattgcaacttaaactgaccacagcattgtcttttaagaattacaaatattattttttggaattaacacttatcaccaaattgataaagttattgtttttaacaaaattaaaattatcattactgactcaaaaatgtatacatttatttatttatttatttatttatttatttatttattttgcagacagagtttttcttttgtcactcaggctggaatgcaatagtgcaatctcggctcattataacctccgcctcctggtttcaagcaattctcctgcctcagcctcctgaatagctgggattacaggcacctgccaccacacccagctaatttttgtatttttattagagatgtggtttcaccatgttggccaggctggtcatgaactcctgacctcaggtgatctgcccacctcagcctcccaaattgttaggattacaggtgtgaaccactgctcctggcctactttttaaactccttcagggaaagggttgattcaaaggtcttatacttgaaataatattttagctattatggaaaatgagttaaatagtggatatataatgttgaagacataaaaacaaacagtacagcaaggagcagagaaagacagtacaatagaaggctatgccagtcttcaccacaaagacaccaatttaacaactatttacaaattaaagtactgtcaaaaaagcaaaaatcagatgagtactcaccatacatggtcttaacttcatatccctgaaagaggtactgaagaggtaggaaaaacagccttgaatcagagacgcccctctgccatcccatggcaacaacagtgtggtgtgaaaagcatttctgtaccctagtgtgacagagagtgcaaaaactgtgagacattgaaccagtgctgtcctgctataacagaaaacaaaactagacaaactcacctgatgcccactcatggagggagcatttaaatcagccctagccagaggggaatcactgatactaccagatattacaactgacaccacagaaatgcaagagatcattcaagagtactatgaacacctttatgcatataaactagaaaacctagaggagatgaataaattcctggaaatatacaaccctcctagcttaaatcaggaataattaggtacactgaatcgaccaataacaagcagtaagactgaaacagtaatgaaaaaaccaccagtggaaaaataaaatccaggaacaaatggattcacagctgaatactattagatagtcaaaggaagaattggtaccaaagctactggcactattccacaagatagagatggagggaatccttttttaaaaaaattctatgaaaccaatatcaccctattaccaaaaccaggaaaggaaataacaaaaaaaggaaactaaagaccagtatctctgatggacacagatgcaaaaatcctttaaaaaaatactagctaaccaaatgcaacaagatatcaaaaagacaatccaccatgatcaagtcagtttcataccagggatgcaggaatggtttaacatacacaagtcaataaatatgatacaccgcataaacagaattaaaaacaaaaatcacatgatcatctcaatagatgcagaaacagcatttcgcaaaaatctagtgtttatgaatgattaaaaccttcagcaaaatcgatataccaggaacatacctcaatgtaataaaagccatctatgacaaattcacagccaatgtaatacctaacagggaaaacttgaaagcattccttctgcgaactggaacaagacaagtatgcccactctcaccatttctattcaacatagtgttggaagtcctagccaaagcaatcagacaagagaaagaaataaaggacatccaaattggtaaacaggaagtaaaactgttacttgtgctgatgataggattgtatgcctagaaaacgctaaagactcttccaaaaagctcctagaactgataagtgaattcagcaaagtttaagaataaaaagttaatgtacaaaaatcagttgctctgctatacaccaacagccaccaagatgataatcaaatcaataattcaaccccttttataaaagctgcaaaaaaaaaaaaataggaatatacctatccaaggaggtaaaggccactaccaggaaaactatgaaacactgctgaaagaaatcatagtcgacacaaatgaaaacacatcttatgctcatggatgggtagaaacaatactgtgaaaataatcatactgtgaaaagaagtctacaaattcaatgtcattcccatcaaaataccaccatcattcttcacggaactaaaaaaaaaaaatcctaaaactcatataggaccaaaaaagaacccacacatccaaagcaaaactcaccaaaaagaacagatctggaggcatcacattacctgatttaaaactatactctaaggccatattcaccaaatcagcatggtactggtttaaaaatgggcacatggtccaatggaacaagacagagaaaccaaaaataaacccaaatacttatgtcatcttacctatatacttatattatcttcaacaaagcaaataaaaacataaggtggggaaaggacaccctattcaacaaatggtactgggataattagcaagtcacgtgcaggacaattaaactgtattttcatctctcaccttaaacaaaaatagactcaagatggatcaaggacttaaacctaagacctgaaactaaaaattctagaggatggcaaaggctttatgaccaagaacctgaaagcaaatgcaacaaaatcaaagataaataggtgggacttaaagagcttctacacaacaaaagaaataaccagcagagtaaacagacaacccacagagtgggagaaaatattcacaatctacacatccgataaaggactaatattcataatctgcaatgaactcaaacaaattagcaagaataaaaaacaatcccatcaaaaagtgggcaaaggacatgaattgacagttctcaaaacaagatatacaaatggccaacaaacatgaaaaaatgctctacattactaatcatcaagaaaatgtaaatcaaaaccatgatatgataccactttactcctgcaagaatggccataatcaaaaaatcaaaaaataccagatgttggcatggatgcagtgaataaggaacacttctacactgctggtgggaatgtaaactagtacaaccactatggaaaacagtgtggagatcccttaaaggactaaaagtagaattaccatttgatccatcaatgccactactggatatctacccagagaaaaagaagtcattataagaaaaagatactgcacaagcatgtttatagtagcacaattcacaattgcaaaagtatggaaccagcccaaatgcccatcaatcaacgagtgaataaagaaattgtgaatatatatatatatatatatgcacacacacacatatatacatatatatatgcacacatatatacatatatatatgtgtgtatatatatgatggaataccactcagccataaacatggaacaaattaatgtcatttgcagcagcctgggtgtaaatggagactattctaggtgaagtaactcaggaatggaaaaccaaatattatatgttctcattcataagtgggagctaacctatgagaatgcaaaggcataagaatgatacaacagaccttggtgactcaggggaaggggtacgaggtgggtgagggataaaagactacaaattgggttcggtatatactgctcagattatgggtacaccaaaatctcgcaaatcaccacaaaagaacttactcatgtaaccagataccacctgttccccaaaaacctatggaaataaaaaaattaaaaaaaaatttcctagggcagagtaatggcttttactttgaagttcagaaaataaaatacattccgtcctgtggaaaaaaaatacctcacaagcacaggcaagcaaagcaaaaatggataaatgggattacaacaagttaaaaaacttctgcacattgaaggaaacaatcagcaaagcgaatagacaacccacagaattgaaaaaaaattgcaaactactcttctgacaagggattgataatgagaatataaaaggagctcaaacaactctattggaaaaaaacttcgtaatctgattaagaagtgggaaaaattaaatagacatttctcaaaagaagacagaaatggcaaatagacaaagaggtgctcaacatcagtgatcactggataaatgcaaatcaaaaatataataagatattatttcaccccatttaataatagaaagaatgaataagacatagtatttgatagcacaacagggtgattatagtcaacaataatttacttgtacattttaaaataatgaaaggggtatgatttgtttgtaaaacaaatgataaatgcttgaggggatgaatacctggttctccctgatgtgcgtgtttcacattacatgcctgtgtcaaaaaatctcatgtaccccataaatacacgtaggatgcacccactaacttaaaaatatgtactttaaaagtgaacagtaattatattttttgtgtagtaccaagtatttataagggcctctgagtatctttatgccctagaaaaatgaaacaaaatgtgtaataaataaattaaccaaagtagttacagaacataaatggcatcgtgaaattcaacagttgtatagtgattacagttttaggttctcaagttcagtaagatttctattgttagtaaaaattagaagagggtggtaactatacagacatagcactgattaatcctaaattcatgccttttaatttttaaattcatatccacaggttatatttgtcagaattaccttctgtcctcaatttttatttgttatttattttgatttttaaattgcaaaacgtctgaagatatggatttacaaatgatgcctgtttccaagattaatggtaatataacaggtaaaaaaggctcaaagatatttagagtatttatcaaaaatataaaatattatcacactggaggtattacagtttggtcatttactttaagatgcaatctgtttggtgtgtttaagtatatgaataaatgcatgtttacttatatgtttatgtatacataaacatgtagtgatatatttgcatacacatgtgtttgtgtctttgtgtaaaaggaattatagttctttgaaagactttagatagtatttattttccaaattcatagtttacattgaatataattgaacattgcacagtattcatttctgtgataaatcagttcaactgtaaaattctatgtaggctgccttatcagtgaaagcttatattcatctaacaaactaaggaaaagaagaacattcctaatattaatcttactcatattcaacaatatattgtattcaaattactcttgtttttagttaaaaatttattaatttattcaaatttcctatcaaaatttattcaaaattcaagatggtgggaaaacaatgactttagttctatatgaaagatttgataattattgacctacttggacatttgtatgtgaattatcagccaattaagggacactcaaaaattactctaatatttagataggaagtgtttgagatattaggttaattcagcttatataaacaataaaccaagatgtcagtttaaagataaagctactacactttctgaattttatactttgcctgccttaagttagcaatttaataaaatatttggaaagatttagagctattttggcataaccttaaagaaataattttgatgtttgataatatagggagacacattcattagtaataaagtgacaagctatactattgaattataggacagaataacagcaaattatgacaaaaattaaaataaagatggcccaaaattatcaatggaaatatgcatttataaaacttaagaagacctgaagaaatatgttaaagtgaaaagtctcagcaaatattactgaaaattaaaactgaatgattagaaaaagcgttgaaatatgttttttatttatttactttgttgtaaatatttaatcatggcaatcagaaaataataccaacaacaacagccccaaatgatttgattatagcagtttacaaatatcatttttaagtagttacatattttagtatttcaaaaatttagatgttccaaatttaatatacttataattacgtgcttaatttcttcaaatgtatggatcatctttcttcactttttaattcagtgaaacaacctttgggtccgtagtttaagctacaactgtttctgatcgtccttttaccacaaaatcattttaagatgatgactgcactgataagaccaaccagtttttaggttgattccattacctgtacatatgctctgcatttatccttaaaaagattttcaaagttatttgatcgccagtaaaatggtacatcataaaacacaaaaatagcaattaagtaaaacctattttattgttgtttcttgagaaagtgtaatgcatagatgattttagagacttgtgttttccttggtgaatttcaaacataaaaataggatgtaatttatatactatgaaaacttatttccatttatgaagcaatactttgaaatggtgaaatattaaatgacagtcccttttggttcatgaaggaggtggatggctctgttacattacactaactttgtaaattaagcattatgatgctcactttaccccctttgcttaatctccttctctgtcagctgtgcgttttgcatttgagtaataaaactcacagaatattagctactcagaaggttttatttcatatctgagaggctctccaatttttaaaatcacagagatttcctatttaaggtcagttattatattatgtgtcacatctcttaaaaattaaatatagccatctttatctttctgcttcacctgaggggctagtgtgtcattcttattacccaacacataaatggctctttaaaatgaactggatttatttggcttaaaaaaactttgatatttaaattaaacacaaccttaattaaatttgtagttcaagaggaaaggcaatgatgcttcagctagagggaaatagctgtaattatacccactatctcagagatgagcttattacttttatatattaataagaaatatataaatattctggcaactgctttataagttatctctacatcttctatcaagtatttgtactaatttctggcataaacacaaacttacatttgtaattatgaaactattttactttagtatttttttaacatttttggttgttttgaactagttttaatacattatatatgttaatttattactaaaatttaagacatttcattctctgacacacgttaatttttttcaataaattaaaacaaaatttaaaaatagttttatgtatacatatttcctgcccattgtgattatgaattttggggaatataaattttaactttatttccattcttttatgaatgtgtgtccatagagttgtcacataatctcattttttaacctgtaactgggaatgataaagtacatatataaggtagctcagagcctagaacattgtagccgtcaaaatagaagttattattttaattttatgtaatatttattaatatttatctaataatattttaatattattttaatcaaagaataatttacataaaaactgcctaaagtctctttgaaaatccagcttctttttaaattttgccatactcattgacacatatttccaatgataatttctacttcagctcactaaagtataatgtgttgaaagtgaaaaaaattaaaatcaggaatttataattatggaattttaaagttgttatatatcttaaagatagcttatctagcaccttcatctttgagacagaagctagttacctaaagtctccaactagttatcagcagactagtgtttagaacaaagctatactggtgacataaagcaatttttcccgaatgccaaatccctccataatatatactatccttaaactttcaatgattttcttaattttatgtatttatgtatgtatgtatatatgtatgtatgtatgtatttatttatttatttatttatttatttttagagacaggatcttgcttctattaccctgaatggagtggagtggcatggtcatagctcactgctgactaggacttctgggctcaaattattctaccacctcagcctccccagcaggtagaactacaagtgtggactgccacaccctgttaatttttaaattttttgtggagatggggtcttgttatattgcacaggctggtcttgaactcctggtcttacgtgatcctcccccgctctgcttcccaaagcactaggatgacaggtgttaaccagcactcctaaactgatttcctttaattagcaatgacatacatattcatttttgatgaatacctacaaatcgatgaaaaattttattgaaaaaaagaaattcttattctactaatttggtcaaaaatgcatatatatttccattgcacttttcccagttcctttctttcttcactctctattgattacaacttaaaagcaattaagtatatttacttaccaaaactagtgtgatcctatttatagttactgggaaattacatctgtcaaatctgtcataggatttctacatgagaaagaagctaatctacatgatatgttaattatcaattgctgtataataaattattcccaaacttggtggtttataacaacaacattaagttctggggtacatgtgcagaacgtgcaggtttgttacataggtatacacgtgccatggtggtttgctgcacccatcaacccgtcatctacattaggtatttctcctaatgctatccctccctagccccccaccacccgacaggccccggtgtgtgatgttcccctccctgtgtccatgtgttcccattgatcaactcccacttatgagggagaacatgtggtgtttggttttctgttcttgtaataacaacaacattatgtatctcagtttctgtgggctaggaagccaggtgctacctgggtacctctcacaaggctgccttcaaggtgccggcggagctagcaatgatcacaagactactgacaaaggagtcattttaaactcgctcacttgattgtcacaggactcaattatttgcaggctgttcgccaaagtctttgcttggcccattagtgcaggtgcatttctacaggacaactcatgacacggctgctgtttcactggagagagtaagagaagacaagagagaaagagaacaaacaagatgaaagtcgcagttttttataaagtaatcttgcgagtaacatctcataacttttgctgttttgtatttattacaagcaagtaattagatcctgcctatactcaaagatagggtgttacacaagcatatgaatatcagggatggataccactgggagacatttcagaagctgcccgagagatattattaatttgagaaagttagctttatggatttaagaaagcacagaataatgttcccatgattgtatgaaagcggctttattttttaaaagtggtccaaggattttattccaagcacttcatatttttttcttgatttattaaaaagaaattgctgatgagttctctgccactcattgaaagttcttttttcttttgatcagattaataaattacttacagagttcaagatgatatttatttagtgataagcatgtagaattttctttctagtctcaatcatgaagttgagaatccatttatacttctatttattatttttcttttcttgttatttacttgccgctatttatttcaaactgcagaactcactttacgaagttgcagttggcttttgtggcaaacatattaaactcaacttagtaccatgagttgaagaaaatttattttgatctcagaagtaaaaatcaaacctctaatacacataaaaagctgtaaaattttgcagcagtatactttttaaataaaagaagcctcactaaactagatgaattaacttttataatatggactggacggattgcttttctatttccaaatagtagactcattaagagaatactgaaaatgcacttcacacatacgagaatctcagaggaggacaatagaatgtagaagccaataattttagcaatcacaatattcaacatatgaaaatcaggaaaaatgtttaatttaaaaatatacataaaatgaacaaaaacatgtaatcggaaagcataaaaaatataatctggttgtttgagtagtttatatggttttgctgtgtccccacccaaatctcatcttgaattgtagctcccataattctcctgggttgtgggagagacacagtgggaggtagttgaatcatggggtcgggtctttccagtgctgttcttttgagaatgaataagtctcgtgagatctgatggtttgataaggggcttttcccccttttgctcggcacttcttcctgcgatcatgtgaagaaggacgtgtttgcttctctttccatcatgattgtcagtttcctggggcttcccaaaccatgctgaactgtaagtcaattaaatctcttttctttataaattatcaagtcttgggtatgtcttcattagcagactaatacagtagcatatttccctaaaaatagaaacaagtacttcccttctcaatttttttttttttttttttttccgacggagtctcgctctgttgcccaggctggagtgcagtggtgctatctcggctcaccgcaagctccacttcccgggttcacgccattctcctgcctcagcctccagagtagctgggactacaggcgcccgccaccatgcctggctaatttttttgcatttttagtagagacggggtttcaccgtgttagccaggatggtatcgatctcctgacctcgtgatctgcctgccttggcctgccaaagtgctgggattacaggcgtgagccactgcacccggccttcccttctcaaatttttgaaaaactcttctaaatttaaatgttgctggaagagtaaatatattaatgagtagtaaataaaatagcttacctactttaaagtcaggtgacttttactttatgtttgttttgaatgtcatgtttattttatattatggagcatataatatattgactgtgttattgagataataattttggatatgttgtcagtatatagtgagacaaggtaataaaatcactgccatgaagctctcttccacaaaatctcaacaaaagtaggatacagtattgaggagacaaattattatttttatttccatttccatttatagtgggacagttttattctattatttttatttataattagatgagtaatctagggttactgtaaaaatattagatggtgcaaatacaaaggaagaaaaatattttcaacattacactcaccagcaagagataaccacaattaacattttgattcatatactcccatagtgcattcagtacaaatatatacctatctatttctatttcataactaaactttgtcctttatgatttcctactctgaccatacataggatcgtaaggcccatgtttgctcttcttcggaattgtcctggctaattctctctccccacccataactcagcagaatttatgggcaaaaatgtgagtggataccaaatataaaagttgtatttatatattatcaatatgtggaattacccacattaataattatatcataaataacaaagtgaatctttaactgcttttgcaagtttactataatatttagatgtaaccttcagggaaatcttgcaaagtattgctattttactctcctgtaacaaattaccacaaatgtaccagtgtaaaactacacatatttattatctaagaatttcactgagagatgaaatttggggggctacctttaaattctgtctaacaaaattaaaggccttcaaagaaacagttaaaatacttaagtgtttaactgaagggttatattactgtgatttactgtactttaaaaaaaaaaagacagatatataaagataagacagatttagatagttttttgctttattgagtaaaataagtttcaattccagagaaaaatatctgtaattatactcacagtgtatatatatgtacataagtgcatgtatatgtgtgtgtatgtaaaaatacatatatattcttcctatataaatgaatgaattagaaatgccaggcttttacaaatcacaaaagttatttctgtaatattttcatattttagttgaattatggcaatggtgtaatgtgtcacacaaaatataaaattggtatgatataaaacactaattacgtataaagcctgttgtgtacccattgtatttataaaacaaataaagtttagtaaggaataaccaatttatctttactatggcatgaataatttgatttgttaatataattgtagtgagaaatttattgaaatacaaatgttgtaagtcaaattctaatatgcctttatttgtaatattatatatataatttaccatatatataaaacttaaattctatctatatctatatttatataaaattcaacatcaccttggcactaagtaaatcacactgtgaatgttaacctcaataacagagaagtgcattttaaactagactctattataatagaatatttatacttaaatagccctttcaatcttactgtcctcttttgggaacattcatcatagatatttaattttaaagtccatctaatgcaatttcctaatttattagaagtggaaactgggccctgttttagaaatgttaggtgtcttgccattggcacttactaatggatgatggaagtaggataagacaggccctcctaactccaggctctctgctctttcccccaccattaaatgaccttccctgctttgatgctaattctaatacaaaggttctcattcttgatttgaaaagctattggaattatgtatactagtaatgtaacatgtaacactgaattaatactgcactttttcagagttccccagctgccacacgcattttgtatgaatcctgtgataaatttgagctttgagcttgctaactttaaacatgtcaaacatcaatatttttgtcaaagttaagttttagaaaatagtaagacaaagactctatcagatgtgcacataactctagttaaaatattatttacagcagtcaaaaattagacataaccataatgttctttaaactggtgtttgaataatggaggaataaattgagcaaattattcaaatatttcacaacaaattattgcctggaagtcttataagctttgagataaaattatgtgcactctgtcctcactgggctgacaatttagcagagaggatacaaacaggaaatagccatctaataaagttgggtcagccaatctaaactaactggactcatttgagattggaaattacaatataagctcctaagaaaagtaaatatgaaggtcccagcaaggaaagaagaaactaggaaattttatcacttgttacatggtaaaaggcttacagctcatgaagaatattcacatccatatttgaggagtttggattttatcctaaaataaaagagaaacaataaaggattttaacaagaaagaaccatacgtttttagaaaagtttctctggctgcatagggaagcataaatcagagagtaattggatggcacaccagttaagttctggtattaattttagatagaagttgtctttgaaaacgctgatgctgttgtgggcccagaagggtagttagattcaagtcctctgatcattactgagaaggaagggccaagttcaccttccaggtttcaccatgggctactgagtttatcatagtattattcactgagattaggaactcagaataaacaatgcactagaaaggtaagatgaatttttataggtaactcacaccaacttttctcaaacagaaatcatccatgtagatttataggaggatgttgagggaactttggggtaatgtcactattaaaagataagttataaaagttcattgacctagaatcaggctaaagatgtagtgacataaaattttgcatatctatagctataatatgaaaaggtctgagaaaatagacaatgtattaacaatatttatgttaggtagcatatgttttatgatattcactattattatatttaattttaagttctgaccactttgtgatctcgtaaaaaaaaagtattaaaacaactttgttaattagaaactctgcttttctgtacttataaaaataattaaacctgaagcttgatatttttgtcttaccttgctgtttttcattattctaatttcattttgatagcatcacatgtatattttgcagagtactatatacttgtaataacactacttacttcttcctctaggaaatattaactgtacttccagtttttgttttatatatttttcataatggcatttattttattgtcaattaacatcactctccacccgtggtattaaatatgtagtttttaaatatgctgtatcttttcttggaaacatttaagagtcacagtcctctgcaacaattcccaatgttatctacaagtagacgattttcaaagggaatctacatatacatgttagataagttgttaaagcttttcaccatgcacagaaaaaaaaactactcaattccaatgtctaaagtacagataatatataataaattaatcaatgtggtgacaaaacagttgaagcaggtaacaaaggaaaaaaagtcaaacatcctagagtaagcttagtttgagtaatcagcgaatagaaatattatgtgatcataattatgcttttagggatgtataatcatttaaggacatgtttcaataagtcatatcatttgtatatcaatgcaataatttatgtttcataaaaatttgaaggacagtattagagactaaagttaaaatactatgcttctaaataaaactggaaaatttaatgtcttggcaaagtctttacgaatatttgtctctgggagaatattctaactacaggatcatgaatgaactggaagaatgaacaaaagtaatgccccagacatgaccctcaacgaatgaaaaataggatataatggataaatggcttctattagttcctcttagtgctataaaactttaccacaaatttaaccacttaaagtaacagaaatttatcatatagtgctgtaggtcggaactgcaaaattcttctcactgggctgaaatcaacatttctcagggctgttttccttctggaggctctaggggatattctgtagctttctcttttccagattctaaaggctgcctgcgtttcctggtttgtggcccccttgcatcttcatagccatcaatgcctagctgacacattctcatgatgccatacggattatttgtctgtgagagaatttcttgaagagatcagcatttggatcagtagactgggtaaacatgatcaccctcaccaatacaggcaggcatcatccaacccactgaaggcctgaatagaacaaaaaggcagtactctcagtactctcagtactctggacatgtaccattggctcttctggttcaggatgctgactttcttggttctccagtgtgcagagggcacactgtgggacttcttggcctccatagtcacagaaaccaattcctataataagtaaatctttccctctctctccaaatgtatatataaaaatataatatataatatagtataatatataatataattatataatatatactatataattatatattacataatatacaaatttatatatatatataaattgtacacacacatatacaaatatatatctcatattgtgtagaatattctctcagagacaaatatccatgaatactttgccaagtactggaactatctgcagcgtactgacaatctctcttacatgcccttttaggtcttctggcccattaaaaatatacatgtatatttttctgaaccacttcatagtaggttgcttacctaatacccttatctccgtaataattcagtacacattctctaagaaataatttaattcctatgtaatcacagtatggttcaaaatatagtgttcaaaattagaaaatataactttactgcaatacttttatttaatctctcggggttttaaaaatgtgtttgcctgggaatatctatttcattttaattttccaaggattttaaaaataatatagcattttttaattggattttttctccaaaatttatgatgtcatttgtctgccttcttgattccatactttcagttgaaatcacatctatttgtcttctttttgctccttaaagataatgtggatttttcatctggccactttaagatttcccctctgaactggcatttcgaaattttactgtgccactcctagggtttattttccttatgactatcctacttgcagttcatgcaccttcttaagttcataggttttggtcttttatctactttgcaaaagaatgagtaattcaagaaaaattgcttctgtcattttagctttctttaattaaaccacagacattttcgaagctcaaatatatgtattatgagtttcttaagtattgcaaaaacatttttttctcatgttaaagattggatgagaaatacatagaaaataccatgtttggactagggagaataaagattttaaaaatctctttgatgtgtttaatccatttctatttttttcctctcttctttattctctctttctctttacattttagtacttttatttttctggcatgcttggtaggtttttttaaaaaaagtcttcaatttgtatgtaaaattgcagtcattggttgatgtactcttcttccaggatggttgaactttcccctggccattatttagaattcagatgatatcttttggtatctttgatatcacatgatatatttgagttttatgtcaagtttacttatggtttaatcttagtccagaatatacatttttctcctagagcgtaactttacttctagagcttacatcttctggcccctgaaaaatgcttcatgacttgaccatgacatgcccatactttaatctaggctcttcaggacaacaaggctctgaagtgttatttttgaattccagttattgttttttgctttatttctgttttcctttgtacatgtccaccgtaaaagttgacagctcaaagaagatagcaggcatgcagactttcggctgcacggggttttcatcactttaagccacagtcacctttgtagctttttaacttcaacctgtctgtgttactaggtgacactactgaaagccaaaataaatatatattttcttagactctaattgtccacaccggaaatgtaaatattccatgtgttaaaaaaaagtgaatgtgcggccttggtgtggtggctcacgcctgtaatcccagcactttgggaggccaaggcaggtgaatcacgaagtcaggagatagagaccatcctggctaacatggcgaaaccccgtctctactaaaaatacaaaaaattagccgggcgtggtggcgggcgcctgtagtcccagctactcgggaagctgaggcaggagaatggcgtgaacccgggaggcggagcttgcagtgagccgagatcgcgccactgcactccagcctgggcgacagagggagactccgtctcaaaataaagaaagaaagaaggaaggtaaatgaggaacatgtctgagtcccagttcacatcccttctctctagaatgtggcccctcacattctatatcccttttattgctctcttatatcctctgagtatttttgtgtattttatacgttttatacttgttttcagcagaaaatttaatttgattaaaaactcaacagtcaggacccaatgtggaagtcctatttgttaatatttttaccattttgaaaataattctaacataaaatttatacataaatatgagaaaacgtttgggtcctgaaagtccccgtgtaggttaaaattatcttagttaactattttaagttaaaactgtcatttaacacttagacaaccttcaataatgcagcttatttgattttgcctgctctgcaagtattagattggtgcaaaagtagttgaagtttttgaaagtaatggcaaaaaccgcaattacttttgcaccaacataatactagttactgatgtcaaatgaaactttacatattacttaattacaaccaatagtaaaagaagttcatgtatttatttagcagtaaccttcaatggtataaaaatgttttaagaaaaagaaaagttagaattattgattttgaagtacaaattatgaatattaactggaattatgcattttgatgagaatttctcatgcagtatggactcatatttaaggtttaatgagtttaagagtgaaggaatgaatcttttatttcagtgaacactgtttgaaattatattttttcataataaataactaaaagcttgcatatacacaaacatgaaaaaaggaaatgtaacatgatttaatatctaatacttggaaatattagaggagaaaagcccacttttctttagcaaaatcattaaaggaattttaggaagattcatgaaaatgtagatgagtgacactaaaccacagtgtccttttaaacatttataagattttattactgaagagtctatacttaagtatagtaataaaaataaaaatcatttaatttattggcagaatatataaatgttaaataaagagactatgacttggaataatcaagtaaatttgcagtttggctacttctacctaatacgtctttaaattctgagcttcattcaagacagagcataaggcaatttcttaggtgctcaacttaactggagaatgattgtttcatcttaaactttaaataagcaattaaaatataagtttcattctgccagtatcatggagaatctctcccatatggacaattaagccttaagacaagattattttatagtttttgaaagaataataatggattttctcaaaagtagacttaactttcgcttttaactcttctttttttgtaatttagctatatagttcagaaagtttttccaaatttatggtagtagtcttacattctagtatgttcagagtggtcaaatatgctcttcatttttataagaagactatagtgacgagctatgctagctttgatgctcctctctttttcttcaccttttattcattttttcttctctttctagcaacatatcacattatttcttcagttctgatacttgtggtaaaatatatttgtgtactgagtaacctatgataagaaatacataacccggtgtgctagggtgataagttgtgcaaggcggcagatcaaggaatacaatgtgtaaaggacatcaggcttattcaggaagagaaatctgttgggtgacgaatggcaagggatgtactccacacaaacaagaactagagatctccagaacttaaacaggaaataaaatataactgaaatcaaggattctagaggaatttcagcgacatgtctaagagagagacacataagccaatgaatatttcaccaaacaacccaaaaaggttacccaggatttggtaccactcgttcagtgtaacatggtgtttatcatgtaaaacatttaaaaggtgacgttgctttttaggagaatctgtagtttaaaaagaatgtaaaagtagcatacaaatttataaagaaaaacatttttttgacaaagtaaggagcactttagatttaaggaataatggtaataaaaataaagtataaggcaaagtgctatctctagcacataatagttactctttattgagaaattttagaggctactcagataaattatatacattatttcttgtaattttaacaaaaaaactatcatcaccatgttactaataaagaaactgagatgttcagagtttttgtactttccatagttaacattctccaatacatggctcacagaaaagtctttgctttcgtttctcactcatttgtggaagctaataattaaaacaattgaactcatggagatagatagtagaaaaatggttaccaggacctgggaagggtggtggggttggttaatggttgcaaaaatatagtaaagtagaatgaataagatctagaatttgatagcacaatagggtggctacagtaaactgtaatttagcatctatttaaaaaataactaaaagagtagaattggaatgtttataacacaaagaagtgataagtgcttgaggtgatggatactccatttaccctgatgtgattatttcacattgcatgcatgtatcaaactatttcatgcaccccataaatatatacccctactatgtacccataaaaattttaaaaaattaattttaaaaaaagtctttaccttgtactttgttctgggaagaatccaaattaaggcattctattctagaaatatttctttgaaattcacactcaggccgggtgtggtggcttacgcctgtaatcccagcattttgggaggagaaggcgagttgatcacctgaggtcaggagttcgagaccagcctagccaatatggtgaaaccctgtatctactaaaaatacaaaaattagctgggcgtggtggcaagggcttgtaatcccagctactcaggaggctgaggcaggagaattgcttgaacttggtaggcagaggttgcagtgagctgagattatgccactgcactccagcctggggaaacaagagcaaaactccatctcaaaaaaaaaagaaaaaaaaaggaattcacaatcagtaattcatgtttaggagttattgactgacattaagaaagcttcaccctttcacttgaatatagggttctagcggtgatgatctttattaaactcatgtttgcaatccccaaagagtttagtgcagtatcttagacacacccaataaatatttgtgcaaataatcatatcaagtgactttgtttaatttatggtatcaggactcttttatagtgatgttttatacaaggcttaataatacggtacctaaaacaaatcagaagtacgttgaagatgaaaaatataagtgatataattattataatatatgaatccatatttttctaccgtaatagtaaaaggtatacatttaaaattataaatttataaaaattgtaatatgaaagtagaaagcattttttatttgctaatcacaaaatgttgttaaaaatagaaagagggatgaaaggtatttgttttaatcaactagcatctctgaatataattcagtcagtgcaatgctatctatctggaacatactttcattcttaaaatcatgaatctcaatgccttaaatattgtgaataatccttttatttaaacagcttgataattatctctgttatcataacaataataatgcagtcttttatctagccatagtgtaaaataatattctatacattaatgcaacttagaaagctataaattatttttgttaatttactcactgattatttctattactctctgaaagcctataatcttaatcacgtagcattaaattcaaaagaagatttgttgatgatgaaaatgatttagatacaaacaaaaaacattttatatgattagtatgacttttccaggtcatcaataaatagtaaaatacgtaatttatttttttgctacatcatgtagcttatacagtttgcattttgcaattattcatccctctttaacctgagatttaaaagaaaatacactcaactcagagctggcctggctacatttcagtcattatctttgcagaaagaatacttggtttactgtggtaattaaaaggctgtcttatgtatttggtccagtgaaatcagttttaatactagcctctagatattaacacttaaccacataattataaaatcttagtggtaaggaggaaaaggtaacaaacaggaattaattactcagcctcctagtttccaacctcttatcctaggacagaaattcataattcgatactctgtcatgaaaaaatacgagtgactatggttatgatgtcattactgattttggttaaatacttgtttgcttctggactctttattttaatgctttcatttttttccgactcaataaaaacaaaagtagaattatatctcaagttattgtttgaattttcagtagtctataatagcaattccaactgctgatttcaacatagccagcccagcatgggctttcctgcaccagctcctggcttttgaagcaaagctaatttctcacacgttcctctcctgtgggaaggtaattatatcagaaatatgggaggtagggggaaggtcagtgcttggtttttaagatattttgtggtactttggaaaaaattattttaaaatatcacaatttgtaaaacacacaaactactccactccagtccagtggtactgaccgatacatcttcattcattcattcatccatttatttatttactaaataattcttgacttgcaaatatgttccaagtgtttggctagatgtgtaataagcactgagtttgtactacttgcctgtgtaaaatgtataatagagtgggtatctcaggaaataagcaaacacacaaaaaagtaaataactataacatgcgacatgttaggaagatagagaatacagttacagagaacagtatggaatataacttaatttaaaagttcttttggacaggcgcagtggctcacgcctgtaatcacagcactttgggacgtcaaggcgggaggatcacctgaagtcaggagttcaagacctgcctatccaacatggcaaaaccccgtctctactaataatacaaaaatgagcagggcgtggtggcgggcgcctgtaatcctggctctcaggaagctgaggcagggagaatcctatttgaacttggcaggcagaggttgtagtgagcagagatctcatcattgcactctagcctgggcaacaagagtgaggctccatctcaaaaacaaaaacaaaaacaaaaacaaaaacaaacaaacaaacaaaaaacaaacaacaacaacaaaacccagaagtttctttaaaagaagtcacctgttttagtttttagaaggaaaggaaagaaccacatatatgaagatagtgttatagaaaagaatcatgagtaagtcaggctttaacagagaaagggtcatttggaagatttgggaaacagaacaccagtgttcctggggaaacatcctgactaaagaggaaagaaactttaaagaaagaaactgtaatagataactggggaacaaaataggctatagaacataatgtagatttcatctaaagtatgatgctgagagttgaagggttttaagctaattttttttttttaagtctggcggtagaatgagtggagggggaaacaagatttgagggaccaggcagatattgactgcaattgtagagagaagaatgctattttcttgaactagagaaggtgtcaataatgataaagaaagtgaatatatttctagaaggttctggagatatgtcataagacagcatgtgaattgaccatgttttccacatctttgaccaagtataatattaaataatatttagtatcttgacatttaattttactaaagataattcatgtgtttgtgttacaaggatattacaaaggtgggaaggagagactacgttaaaagaaaaggtaaagtgaaggatattgaaaagcaaaagcaaaggaagaaactcattcaaaaataagttacaaaataaggcaaaatattaggtaaacttagacatatttcataaatcttttaaaatgagaacaaacttgagaatacagggaaagtgcttttgatgcatctgttgctattcaccttctctttctcatttaaatatacatttcaaataatgaaaaccttttgtgaatatactatgtagtatactcatattaataagtgatatatttaaaaattaatccttctatatccaaataaatatacaacatctaaacctactaccaatttgtcacataatgatgagtagagagcaataaaatcaatgaaaagaattttgttgtgaatgatttttgttgtgaatgataagcaaacattgcattcaataaatctgtatttataatgtgttaaaaaatatctatcaagctaaactaattccctcgtcacctgaaaagagagaagaccaagaaatgactgataggcaaccaacaagaatacctgtgaaatggagacaagaatgtttgagaactgactgaccatccagtggcacctgagaaaaggtaagaatcagaatggcagattatctggttggcaagaaatgtataaaaaggaagcaaaacagtagaaagtttataagtagtagtacatgaatatgaggtgagccctggtggtgacagaaagaggtaatttttgaaaaaaaaattcttctgaatgaaaagccaggtgtagttagaaacctacatgatgtcattctggatcctcagaaatgcctacatttcacaatatattttcaacaattttctaaaatattagaactccatctattactatttatatatgaatatgaatacctctggtataactatcttattgatccatattggtcattggtatcttacatctattcattttccatactattccatgataatacacagagagaagatttagaaaggagattttaaaggcaaatattatataagtctttcttggtacaagtatttgataatgtaaagtacaatttatttgataatataaatggttatgtactaaatcgccccctaagaaacttcttagaatgacttttataatttatttgtcctaaaatcacataataatttcttaatgattggagtttgacaaatccaagtagagatttagtttatttcacttaataagggaaaaatgtctttgaattaatttataattatgattgttggtaatctttgtccctctgcatatctacatgggatgtatgataaaattgtaataaacaaatgtcattcaattaagaatattagaaaaataataaaaatattttgtttaagatataaatataactattggactgcaactttattaaccagcattgccttatgtaatcagcagtcttttacttttgcatatactgaaatactgtataatattttggccttttttcaggatatgtcaatgttatctaatcctggatcatgttatgcaaaattctaagatgaatctgaagacacctgctttatggtttgcaaacattgtacaaattcctcctcttgtatgtgttgtggtctgtgcataagatggattttataactataattaggctgcattatatgacaaaggtaaaatgatcttgcagatgcaattgaggttccaaatcatttggttttcagttaataaaaaaaggaattatttcagtgggcttgaattagtcatgtgtagactctaaaaagaaagagacatggaatgtgagaaaaattcaattccgttgctggttaagacagcaggtggcctctaggattgaagagtggaccctggccaatagctggaaacaaaacaggggcctgacttgtaaaaacagaggattgaattctgtcaaaaaccacataagccttaaaacactatcccaagctccacaaaggaaggcagcacaaccaacaattttttgaggccgaatctctctaccttgcccagattggtcttgaacccctgggtgcaagtgatcttctaagcacaagtgatttcctcttcccccacttcagcctcctgagtagctgtaattacagacacatcaccaaacctagctaaagccatcatcttgatttcagctttgatgtgctcttgagcacagggtcaagctaatctatgctcagacacttgactagtggaaattattagatagaaaatgggtgttatgccaattagtttgcgacaatttattacacagcaaaagaaaactaatacaatgtcaaaagttatttctatctgaattccaaatgttagaactagactagaaaccaaaatcatttaaaatccaaatttgtcacatgtgattaatagtcccattttactgtctgatataaatgatgatgtatttgtttgttaaataaaagatatggacatcagaaagaataatattaacaaagtttggggggcaatgaattcaattttatatcaagcaagttgaagtaaatctactgttgggacctagatcttgtgcactcctactcatgctggtgactgcaacattctacgacttcacaacctctagagttacttcattttttttttcttttaagaagcaaccatattaagtgacaggattacttcttaaaatactttatacttctagacttatataattttagatggtgcactggctgttcatgtaagtaaaaataattaacaaattttgcaaacttctaattttctcaaatacaattaatccctttagaaaaactattgctttgttttatcaagaaagcatgagagtactaacaaaacatttataataatgctgagtctaattcttataatcatgattatgatcatttattggactgttatcactagccagatactacgtagagtgttatatgcatattactttctaaaattttccccatacaacaaataattgagattgcatctattcatactcattccattttatatggaaggaactgagaccagaagcaggggagattgagagttattgttcactgggtatagagatttggttatgcaagacaaaaataacaacataaccagtaagcaataaattgaagaaataaaattaacctttatccatagagctaaaacttttaactactgcactatttcaatttattagtacagaatcatagtgcttacttttcaacctactccaaacccaaaactccttcatatagtcaatattgtaattgagtggaactgcatttaatgatgaaatgtaagtttctatttgttaaaacacatgctttttctgatgtaatatattgtgaacattttctcactagtcacattatatttctccacaatactaaagatggtaaagtgtcttttctggtttgagtgcttttttactttaattttttttttgtctaattgctctaggtaggatttccagtactttattgaacatgtgagtgagcatctttaccatgtttctgatcttagagaaaaaactttcacgttttcattgttgagtataatgttaactgtggctttttgtatatggcctttattatattgagataatttatttctattccttgtgttttagtatttttaattcatgaaaagatgttgaattttgtcagatgctttttctgcatctattgagttaatcctgtgttttaaaagcttccattctgttaatataatatagtgtatcctattgattcatttgtttatgttggatcatccttgtctcacaaaaataaatgccacttggtcatgccatgaggtatttttactgtggtattgaatttggtttgttagtattttgttgaggatacaagattttatatttatatcttgtaattatatctttgtctggctttggtgttggtaattctgacctcataaaatgagtttggaattgtttcttccctttacattgtttataatagtttgagaaggaatagtgttaattcttatttaaatatttgatggcattcttcagggaggctatctagaccatgacttttcttcactgggaagttttggtgacgaattcaatctcctagctagctataggtctactctaattttctcttttttcatcattaatttttgataggttgtatgttttaaaaaatttgttcatttttttctgggttatgcagtgtattggcatataattatttataataattctcatttttattcctgtggcatcagtgttaatgtctcctcttttattactgattttatttgcatattcaatttgaaaagaatgtacattccgtagttgttgggtagaatgttctgtaaagctcatcacttaggcacatattcatcaagttatctcaagtcaagacaaagaaaagaatcttaagagctgtgaggcaaaagcatcaggtagcctataaaggaaaacctatcagattaacagcagatttctcagcagaaaccctacaagctcgaagggtttggggttctatctttagccccattaaacaaaacaattatcagccaagaattttgtatccagcaaaactaagcttcataaatgaaggaaaaaataacagccttttatagacaaacaaatgctgagagttcatcactaccaagccagcactacaagaactgctaaaagaacctctaaaatcttgaaacatatcatcaaagtacaccaaaatagaatctccttaaagcataaatctcataggacccataaaacaacaatacaatgaaacaaacaaacaaacaacaacaaggtatttaggcaacaaatagcatgatgaatagaatagcacctcaagtctcaatactgatattgaatgtaaatggcctaaatgttccacttaacagatacagaatggcacaatggataagaattcaccaatcaaaaaatctgctgtcttcaagaggctcatctggcatataaggactcacataaacttaaggtaaagaagtggaaaaagacattgcatgcaaatggatccaaaagcaagcaggagtagctattcttatatcagaccaaacaaactttaaaacaacagtggttagaaaagacaaagagggatattatataatgataaaaggactagtccaacaggaaaatatcataaccctaaatatatatgcacctaacaccagagctctcaaatttataaaatgattactactagacctaaaaaatgagatagacagcaacacaataatagtgggggacttcaatactccactgacagcactggagaggtcataaagaaagaaagactacaaagaaacaatggacttaagctataccctagaacaaatgaacttaaaagatatttacatttgtttcttttttaaataaaggtacttactggtataaactttcatcttagtagtgtttttgctgcctccataatttttggtatattgtagtctgtttgattatttgtttgtcacaagacacttttggttttctttttgtttttgaacctctatgacaaaattaaaagcgatttttataatgctgatagagtattacagtattctagacctgttgatatatttacctttaccagtaagctctatttttcttttgctttcatgttgctgtctacattccttttgttttaaactgaagtatttcatttagaattttttctaaggtagatctagtgatgataaaaatacttctgctgtttggaaaagtctttaattctttcatttttgaaggatacttttgctggataaagtattcttgactggcagtgttttttttttttttcatttgtttgttttcatcactttgaatatgtcattgttctgttttctggcctgcagagttttcgctgagaaaactgctgatggtattatggggtatttttgtacatgatgatgtacattttccttgttgctttcaacattttcattttctttgacttttggcaatttgattatgtgtcttagtataaacattttagattcattgtatttggagtttattgttttacttgaatctgggcatctgttttcttccccagatccagaattttccatttattttcttcaagaaagtttttttttcaccattctctcattcttctgagtctcccagaatgtgtatattagtttgcttgatagtgtaccaaaatcatcagatgctttcctttgtcatccttacttttgttttctttttcttttctggttaaattatttccagtgatctgacttcaaatttgctaaccctttcttctgcctgaccttgtttgttgtgaaattcctctagtgaatttttcagttcagttagtatattcttcaactctagcagttatatttggttctttttatattttctctttattgacattttcaatttgtacacatcatttttatgacctggttgagtatcattatgatgcctatttttaattatttgcaagttaatacatgtataaagttgagtatcccttatcccaaaatttgaaatctgaaatgctcccaaatctgaaatttctgagggctggcatgataccaccagtggaaaattccacacctaaaatcacataatggtttgcagatgcacaatacagagtttattcagtgtcctcaagaaaaaacaaacaaacaaaaataaaaaatacctctccaacccccttaagcttcagtatatcttttccacaaatgcccagatttccacaagcaagaataagaaaaaggtaataaaatgtcatatgtgcaggcttcacatgccagtggtgggtttcccacaatgccctacctgggaccaagacgtatgtgctttatttactctgtttttttttttttttttttgaagaatttcctatgccaagtgaaaaaaaaatgtctaatctctttacatatgtaaaaatatacgttcagagtctgtcagtaagctagaagaagtaggtattgaagaaattttcaaattctattctttattcattaactgatagcaaaatagccaaacttgttctgaatcaaggtgatcatgataatagtaataattcaaatgacattgcttgggtagcagaaagcaatgtctacagataacatagtgaaaacgtgatgggcttgttgaaagactacagcagtgtgcattcataacagaataagaaattatgtcagtttgtaaaatcaaagaaagaattttaagacaaaaatttcttaatgattcaaatgacttttcagtaaacatttttaaaagccgtcttgcagaatgcctccttatcccccagggattcacttcctggtctttcaaaagcttctgaactttcttttcacctaaaaaaagacgcaatgtatagtaaccttttcatagagacaaaacatcatagctgaacactaacatcctgccattgtagtttgtgttgtttaaaagctagtatatgtactctgataatgctgctgtattacttagttacctcgaataacttattttaattgtattaatggtatttttatgttaactacttgtatttatttgtacattcttgtacatatttttgtcattaagtacttctgtgcaaatgagggtaagaaaatgactgcttatcatttatatctgaattcagaatcaagaatcatggtgataccacacgaatccagattatctacatgcgtggctgagataaagaaacttttgctttttcatggttcaatgtacacaaacacaaacctttttatgcaccaaattatttaaaatattgtataaagttatttgcaggctatgtgcataaggtgtatctaaaacataaatacatgttgtgtttagatttgggtcccatccctaagacatctcattaattatattcaaatatttcaaaattttaagaaaattcaaagcacttccggtctcaagcctttaacataaggaatactcaaactgtagatctctttcttcagtgtttgtttttggagatgtattttgtttctttttgtcatgtttccctgtttctttgttccttgtaactttgtgttggcattcacacatttgaaaaacagctaagtctctcaatctatatagacgagctttgtacagactaaagacatttatcaatcagcccagctagagagtctggggggcactcaagtttctgtgatacatcttctctagttgtatgtgcaaattcccagttataggggtctgccattttagttttcaggtgctcataatcttttgtgcccactggtgtttgtctgtggtgcaccagacattctggagttctcacaggtcatttgctctcttttgttctcataggcccccaggcttctagaatacattgagtcctatcagtactttgagtccagaaagatagaagtttgtactttgtgcagccccctggacatcttggacattggacacatgctttactcttccccccttttaaggaagagattactaaactgtattgtcttctgcctactgtgctgtgggtcttctggagcagcagcaagacactaacctgtttgctctcagcattttccaggcatttagaatacgccaggtcttgtcagtgttctgacacaggtgagatgaaaccagtctcttggagacctcaaaaagccagaatatccaacccttttcttccttaatgaaaactcaagagttttctcctctttttttttctacactgagctaaggggacagactacggtgagaggatgcatgcagtgaaaaaaaaaaaaaaagcctttgtcctcagtgtctctcagtctgttgcctttcactatcagctctttgaatgtggtaagataaaagccagtcccttgatcagtctttctgaatcgtcagaatgttggagatatgctgcagtcttctctttctttctttagggagaagccaggagtagaagtctcctatgatcacatggggctgaacaagagacagaacaaagataattcagtaccacaaattttcctgctacctttgatgctgctggttttgaatcacctggggtgcgggagacttttaacctttaactgtatttctcacaaaagaaattgattcatgcattgttgttgagtctttgtctccatgggggaaaggagagactctatccttctattctgccatcttgctgacatcaacgatctgaaattatttttgactatacagtgaagagatagctaatgagagtgtttggaaatatacattaagggagtatgtttcacataaatataacaaaattattaatggagttacaaattgagctgtcattttcatttacaactaatctaatatttatttcatttaaacatacaactataaagtgatgaataatatcttattactttattgtgatccaagtttgaaataatggaccacagagcttagagactgaatatacaaataagcaatgaccagactgcatatcacaataagcgcaagaatgcaaaccacaacctctgcatcaactggcccagaattgtcaggacttggtcgtgacagcgtatgactgcttacctatttttctccctgcttccaactcatgaccaaccaagtaaaatcaaatgtactcccaaaaccaaccacagaatatgtcctgctgttagttagctgagtttgagcatcctcatgacctctaatcagagtgtacctgaaaccttctatttgttcactatatagcattctcactcccctgcctgcatttgaatctctgtcacactcaagcttgctgtaggaaactctgaataggttatgtttgtttatatttgggtagtcttcatatagcatattagtaaaattattctcaagtatatagtaatcacacaggcagctatcaggactaaatggtaaatagacaagacacttgaacagatatttttcctcaaagatgtataaatgactgataaacccttgaagatgctctaaatcactaaactttagagaaatgcaaatcaaagccatgatgaaatatgacatcacaactcttaggatggataacattaaaaaaaagacagaaaatagcaagttttgataaggatgtgaacaaattgaaaacctatgcattaataagtggcagaaccatggtggaatacacttttttagcatttcctaaaaaataaacacttgttatcataatatccataaattccacttatgtaataaaagacaagaattcaaacacacatttgcacactcatgttcatagcaacattattttcaatagctaaaatgtaaaagctacccaagtgtcatagatggatgaataaatcaacaaaatgttgtctatacatacaatggaatattatttacccctaaaaggaagaaatactcacaaaggatcattcatgctactacctgtatgatccttgaagatactatgctaaataaaataagccagtcacagaagggtgattgttgcaattttttactaatatgaagtacctagagtagtcacattcatcaaggcagaaattagaatggttgttgcctaaggctggagagaacaaagagggttattgtttaaagggtacgaagttattattgggaaagatgaaaaagttctagaaatggatgatggtgatggttgcacatacatttgaatttactgaatatccctgaaccatacacatacaaatgattaaaataaaaaattcaaagaaagttttaaatgtttctggagcttaacaaagaatgccatccatagatgaacatttacagtttagatgtgactattcaaattatgagaaagtcactattcaccagagtgtacagggaagagaagggtctcaagaactatgctttggggaaacaaaatatcttgacccaattcccacttctgaacatacctccgccactcccacgaaggcactttaatttcttactgaatttgttgtgttaaacacttgttttgtatcagtcataaatataagaataatctaacgccttactttatcatattactttaaaaactgctatgatttgttgatattacacattcagggagagaggaccggggtcatgcagtctgtataaagtgcaatattaaagccttctgtagtttttaatgtctcagagtccaaactctctttgtttcactcttcccagacactaaatctggtctttggccagggttattttctaactgagcagtaagaaaatactaatcataaaaataatttttgccagattttatgtaatttgcctgtgttcaataccagtcagcacttccgcatttagaatgctttgtatttctctggggctatgacaacaaatttaggttgctttcagtcttctaccattgttacatatgccaggatttagctttcagttactattatttgttaattccattaagtcagctggaaaccaacttctatattgtatttttttttctattttaaagatatttgaattctcttctttttttctgatatagtataccttgaggacttatgcttttgtttttaacaccactgctatcgattactatgggtacaagagggaaaataagtaaaattgtgtctaatccactatgcttccctgctaaagcgacccactattaatcaattatctctcttgtttctgttttatttcttgcttgtctcttttatactgaattgttttcatttttcttaattttctccttaaaccctggttttcactgttctctctgctccttccataatccccttaatttatatccacattccagatggccttatatgctacatgttcctgggaaacgttcatctccccaagtgcctacaatataatatctcctccataaagaatgttaagtaattaaattacaaagagaagatcataaagagtaatcctgtgttgtagaaataaatggtgtacatatttgtgtgtgttcttattattttttgtgaggatatgaagtaaagtctccctatgaatgtaaaaagttaatacaaaaggaaaactgagtaaaaacttaaatttgcttatgtatttctctattatcccacagacaaagtaaaagtgacattttcctacaaatttcttatatttgaaaataaaatttctagagattatgtggggaaaattaaactttaattccacaataataaaaaaatgttaaaagctagtaggtttattagagaaacgtaagtgattacttgttcacttctgtgaaatgagttacttaagatgccatatgccatagccatatgtgtgaaaggaatataatatgaagtatgtagaactgtttaagaaaacatttgggagttcttttggctataaaaagctcagattatgtggattaatttgttgacatcataaattgcaaagaaaattaaaaacaaggtgatatgtatatgactatgtatttatatatacatacacaagcatacctcaaatatattgctggtgtggtttcagaccaccacaatagagagaatattgcaataaaacaagtcacatgtaatttttggcttcccactgcctataaaagttatgtttacactatacacaatagtctattaagtgcgcaatcacattatttgtttaaaaagtacatactttaaaaatactttattgtttaaaaatgctaataatcatctgagctttcaatgagtcaaaatctttttgctgttggagggtgttgccttcatgttgatggctgcggactggtcagaatggtggttgctgaaggtggggttgctatagcaatttcttaaaataagacgacagtgatgttttcctcattgattgactcttaccatcatgaaagatttctctgtagtaggttgatagcatttttacccccagtagaatttatttcaaaattggaataaatcttctcaaagtctgccattcactgctttatcaactaagttcatgtaatatccaaaatcctttgttgtcatttcaacaatgtttcacggtctcttaaccagaagcagatttcatatcaagaaaccactttctttgctcattcataagaagcaattcatcactttttcaagtattatgaaattatagcagtttctaccacattggtagttacttcccccacagaagtctttaaccccatgagtagtcacttatgagggttgaaatcaacttccaagcttctgttacggttgataatataccctctttgcctgcatcacaagtgttcttaatagcatctataatggtgaatcatttccaggagggtttcagtattcttttcccaaaactatcagaggaataactagaacagctataatcttacaaaatgtatttcttaaataataagactttaaagtcaaaattacttcttgatccattgactacagaatggatatgttagcagacatgaaagcaacactaatctctgtatacatttccatcagagctcttgggtgaccagatagattgtcaattagcagtaatatcttgaaaggaatatttttttctgagcagcagttctcaacagtgggcttaaaatattcagtaatccatgctacaaacagaaatgctgtgaaccaggatttgtttctccatgtatagagcacaacagagtagatttaccataaatgtaaagggccctaggatttttggaatggtaaatgagcactggcttcaacttaaagccaccacctgccttagcctgtaacaagagtcagcttgtcttttaagctttgaagccaggcattgacttctcctacctatgaaactcctatatagcatcttcttccaataaaagttgttttatctccattgaaaatctgttgtgtaaccactttcatcaatcatcttagctagatgttctagataacttactgcagcttctccatcagcacttgctgcttcaccttgcacttttatgttatagaaatggcttctttcctcaaacctcatgaaccaacctctgctagctttcaatgattcttctgcaactttctcacctctctttaccttcacagcatttgagggagctagggccttgttctaacttaagctttgctttagggaatgctgtgtctcatttgatcttccatctcgatcactagtagcttttccatttcagtgatacagctgatttactttctcatgatttgtatgttcactggagtagtagcttaaatttctttcaataacttttttttttgcatttacaacttggctaactggcacaggaggcctattttgactttcaacatgtcttctttactcagcttatttatttctagctttcgatttaaagtgagagatatgtgacttttcctttcacttgaacacttagaggttattgtagggtattaattggccttattttaatattgttgtttctcagggattagagtgaagtgaggagagggagagagatggggaaaaggctgcttgataaagcagtcagaactcattaagttctacatcatatatggacgcagtttatggtgacctcagacaatagtagtagtaacagcaaagatcactgattatataacaaatataataataacaaaaaggtttgaaatgttgtgacaattaccaaaatgtgacacagagacacaaaataaactcatgctgttggaaaagtaacagtaacatatttgctcgacaaaaggtgccaacaaaccttcagtttgtaaaaaatgcaattatctgtgaaggacaataaaggaaagcacaataaaatgaggtaggtctctatatgtatacttaaaaaagcaaattgttaaacagagtacacattataaaggacttgtctaccacatagatgtacttgatcctctctatttttattctaaagataaaagcaatgaaattaactgctttgacaattgtaataatagtgagtgggcaacaggaaaaatatagaagctagaaagcagattacaatgcaatgtagttataatatttatcacaagttatttcattaaaagacatcacatttagttgtgactggtacatcacagtaattatgaattgggttttaatgtttgattattttacaacccttgacaaaagttgcaaatttgaaaaaaaattattattttaaatttaattttaaatttaaattatttaaatcattttaaatactaaataattgattttagttgtttagaaagcatcctaagactaataatagtgaaatattatttgaaatatagatttatatttgacatatagattttgatcatacatataatttgtcttaattttttgtgtcttcatttcataaataaaagttttaaactaaaagcaatgcaaacacatggtaaaagttaaaataaagctgaatgtctgtcatgcttatttcaaatttgattatgcaaacaagccaaaacagtcaccaagaggcaaacagaagtgagaaacatttgaagattggtttaatggacaatcctatcaatattaagagaaacaagaaggcgttttaaactcctcacttctgtcttttactgcctcaaccacacctacctttatatagccttacctttcttttattttacttttcagacaacatgtatttataaatttcaggtaaagattaaacttctatgttaaaaactgtattacgttgatgattacttccactttaaataacattaatattaaattcaacatattgaatttcatgattactcttcataatagtgaaagaaaaatcaatcagcaatagtagtcaatgtacatgaatcaatcaacgtgatacatcatatcaacagaatgaaggacaaaaactatatgatcatttcaattgataccgaaaaagtattggataaaatttaacatcccttcatgttaaaaaccctcaaaatgctgggtatagaaggaacatacctcaacataataaaagccatatatgacagacatatagctagtatcatactgaatagggaaaaactgcaagcctttcctctaagatctggaacatgacaagaatacccactttcaccaaccaccattattcaacatagttctggaagtcctagctagagaaattagacaagagaaataaataaaggccatccgaattggaaagaaagaagtcaaattatccttgtttgtagataataggatcttacatttggaaaaaccaattccactgaaaaactattagaactgataaacaaattcagtaaagttgcatacctgtatctacgtatctcacaaatatactggaagcagaaccagagacaggaataaagatatacctgaattttggtggaaatgtttttcaggaaaaaactgaagcgggatagagaagagaaaaataagaacaaagatattttgatccacagggaaaagaccctggagaatgcattactcccagaagatggttccttttttaggccagagggtgagatgttggaaaccatatactgttaatcagggctaaaggtcactccctggggaaggagcagtggtgtatgttttttagggcagtgactcctatcagtcaagtgcatttctatgtagataggtgacagctcctagccattaccagtcaaaagagatacaaaggaaatctaggtagggcaaccacatctaccactacccacaaaaatgtctctatgtgtagactctatgtctaggcttttatacgacaaaggctggatatagtaaatatccatatttatcaaattatatttgtatttcataaaccacacaatttggcaaatattttagcaaatgatttccctatctgtctatataaagccacaacctttgtctacttcacaaaaatacttcagattttgtatttttggtgaaacgactaccattcctcccagagaaccagaagcataccattaaggccaggaaatacatgtggctgacctgaatacaaatatgagtagaaaaaactcacaaaaaaagaactataaatagtcaattaaaataaaatctcaatatttaacctccccagcaataaaaaagaattttatactttgtataatgggttctacctggtagggttgggagagttatatgaaaaaaaaaaaacaaaaaactctataccctaaaaagttgtttatgtattgaagtagtagaaagaaacagaaaaaaaaaaaaagaaagataacctaagtgttcatagatatagcactataggagtcaattctttcttgagaaaatagtcaagataataaaaaatccaagtcaagagtttagtcagtgtcttttccttaatttttgtccctgctcctaatgcaacaacatgatacctataatgttgtattttctaagcttatagaaatacttattattattattattattattatttttttgagatggagtgttgctgtgtcgcccaggctggagtacagtggtgcgatctctgctcactgcaacctccgcctcccgggttcaagcgattctcctgcctaagccctcccgagtagctgggattgcaggtgcaggcaaccacgtctgactaatttttgtatttttagtagagatgtggtttcaccatattggtcagggtggtctcgaactcctgacctcgtgatccacctaccttgacctcccaaagtgctgggattcacaggagtgagcccagaaaatttcaccactcccaggaaatactttttaaatgcgggccctcagaaacctctgcagtggactgtacaggacataacattgaaaaactcaaattaacatagtccttatttcttttactaactagaattattgtcagtttttttggtcaaataaattatagcgctatgctctaataggagcagcacatgaaaacataatttaagccaaaaaaagtcaaccctaaatatttttgctgttttaaggtgctggagaggatgtggagaaataggaacacttttacattgttggtgggactgtaaactagttcaaccattgtggaagacagtgtggcgattccccaaggatctagaactagaaataccatttgacccagccatcccattactgggtatatacccaaaggattataaatcatgctgctataaagacacatgcacacatatgtttattgcggcactattcacaatagcaaagacttggaaccaacccaaatgtccatcaatgagagactggattaagaaaatgtggcacatatacaccatggaatactatgcagccataaaaaaggatgagttcatgtcctttgtagggacgtggatgaagctggaaaccatcattctcagcaaactatcacaaggccaaaaaaccaaacaccgcatgttctcactcataggtgggaattgaacaatgagaacacatggacacaggaaggggaacatgacacaccggggtctgttgtggggtggggggaggggggagggatagcattaggagaaatacctaatgtaaattatgagttaatgggtgcagcacaccaacatggcacatgtatacatatgtagcaaacctgcacattgtgcacgtgtaccctagaacttaaagtgtaattaaaaaaaatctttgctgttttaaatatttaataataaccctttcattatactgtcaatttcttgttcctacagaaaaatgcccaaaaatgtacagagaaagaaatatttcttcagaggctgccttgtggctggtcttaaccgtatcaaaacatcacattccaattttaatgattccaagcctaagggtagaatttatcaatttttccaattttctaaagactccaggtagcaaacaagacacattagattagcaggacaacagctatgtttccacgggttctgtcctgatcatttatgagcctttaagagttgtctttcaatcaaggttgtgatataccttgccctttataaaatagagaagcttgaactttctgttgttaaaagaaacgtctgactcagtctaataccttaccataggaaccttattaatcaggtctagtatatatactttctattatgttaacctgcactcatatagagctatttcaaaattgcaattcagataggtctgactgtcctatttaaaaattattctcaaccccaagtccagtcaatcattcccatctcaaacttatgctaaactaaagtttcccatcccacaaaatgaaagtatttgaaacatctttggctctttacagagcagtgtgacctcatatctcgaaagaagtaaaaaaaaaaaattattctctttaataattaatatgtaaattttatttatctatgtaaagtgtattagaaaataatttttaaaaaattattttaaaaaaatggactctctttaattgtgagtccattaatttattttcttttacaaaaaatagtaacaatagaaacagcaatgcaaatcaagttcataacctaccacttttgtgagttttttcctactgtttcatgtcacagaaatagctgttttgaaataactaaagccagacctattgcacacggtcacaattttatctattttaaatatctttgaacagcctcacaacagggtcatggtctctaggaaagtctattttcctctaaagaaatacctgtaggcatttgagaaaaagccaggcattttcaatcccttttaaacacaaagagaacattttaaaaggctgctaataattaaatggagatctaaaggaccaatttgcaatagtttttctttacagaggcaagctcattgtgctgaaatgaactcataattgttcatgaaatatttgcatatgagaattatctgcattcctcaaaacggtgggatgaaattggaattctcctcttttcaatatatttgaatgcatctacatgtgcacagcgaattggagaaacatggttttttttttaaaatactactttctgaaacataatgaataaagagggaaatggtatttaaaatggaattatgcatctctctaattcaatgtttctattttaatttctaagtttcaaaatgtagatcactcagcatccacaaccacggttaagtacatcacatattcagaccacctaactctagttaacacagtgatgtgtgattcatgtcctgggtgtcacagatttctgcccaaatgtgtgattttgtataaaatatgagagttttagtcctattgatttcaatattttatataaacatggctctgaaaaactgtctatatgagtctcttacttaagaatatattctcccattagataacaccattactttttgtgaacaatttttattattttcatacatacttttaattaaaaattgaaggtgacaagagtagtataaaaatctaaaaattaaaaattatccacaatttttctactttcaatacttatttaacattctatcaaacttctattctgtttattccaccatgactttcttgtccagaagtatgcatagatttactaactacaaatctagtgcatgtatctattttccactttatttttaatgcatgttatttttttaaagttttagagttataaaaacaaataagaatatagcaaagagatttccctttcacacatacagttttctctgttattaacatcttactttagaatagtatatttgtcacaattaagaaatattgcacatttttttaactaaagtccttgattaatcacatgtcctattttttcccctaattctctgttccagaatttcatctgggatatcacattacatggttctcgttgcatcaccgtaagctcctcttggatgtgacagctttgggaggtaagcttttgaaaaatcctggtttattgtcataactatactgagatttggggaggaagggcactgatataaagtcctgttatcatcacatcatatgaagagtacatactatcaacaagttgtatcactattgatgtagatcttggtcatctggctgaagcagtgcttgtcaagtgtcaagtttctttactctaaagttgctgtttttgtctccattcccatgctatatactttggaaggcagttgttatgcacttctttcctgtgtggtaaactacataatcatttttgtgtaacagtatggagtcacgtgtatttattgtgtactttatgttataatccaatgctactttatttactttgtttctcaaattattacagctttgggcattgggagctctttcagttggctattatgttcctttgaagtacgtttatcagtgtgaaagggtttctttgtttgtttgttgtttttgatcactttcttcctttctaatgccacgtaacgctccagactcaagtttgaaattttctgcctcagccttagaatcagccttttctctaaggagtgttagtttctttaatggttaatgatactagaaaccaagatctagtgctctttgctactgcaatgtcagttcttttaggccctctcagttgacaggaaagaaaaaacatatgtatgtatgctaacctgtagacatgcacatatatctaccaactcatttatttaaccatcatatctgtattaagctaaaaatgaattcaactattccaaatgctaccaggggggtccttgctcccagagctcccaagatggtggtgggctgcttccaagatggtggcaagcctcgtgttctctgacctggggttcttggcctcacggattccaaggaatagaatcttgggccatgcggtgagtgtcacggctctattagaaaccgtgggtcacggaagagagtcatggaacccagtgcctagtgttcagctcgattaggacgaaccggggcacttagccgtgcaggaacaatggcaagcctttagcctgatcaggagcggcaatgggttcctcgctggttcaatttccatgtagttgtgtggttttgagtgagtttcttcatcttgagttctaatttgattgcactgtggcctgagggactgtttgttattatttctgttttttgattgtttctttgttttgcatttcctaaggagtgttttacttccaattttagagtatgtgctatgtggcactgagaataatgtatattctgttgttttggggtagaaagttctgtagatatctattaggtccagagctcaattaaagtctgaatatccttgttaatttttcatcacattattcttgtgttggagtctaagtctctttggaggtctctaataatttgtttcatgaatccgggtgctgatatattgggtgcatatatttttaggatagatagttctttttgttgaattaatccccttacctttatataatgtccttctttgtctttttttgacctttgttggtttaaattctgttttgtcagaaactaggatcgcaacccctgctttttcctgctttctatttgcttgataaattttcctccatccctttatcttgagcctatatgtgtctttacacatgagatgcgtcttgaatacagtacatcagtaagtcttgactctttatccaattctccattgtgtgttttttaactgcagcatgtagctcatttacatctaaggttaatattgttatgtgtgaatttgatcctgtcattatgatactaaatggttattttgcacactagttaatgcagattcttcataatgtcactggtctttgtattttggtatgtttttgcagtggctggtaccagtttttccttcccatatttagtgcttctttcaggagctcttgcaaggcagacctggtggtgacgaattccctcagcatttgcttggctgaaaaggattttatttccccttcacttatgaagctttgtttggccagatatgatattctcggttgaaaattggcccctactgtcttctggcttgtagcattcctgctgagagatccgctcttaatctgatgggcatccctttggaggtaacctggactttccctctggctgcccttaatattttttccttcatttggaccttggagaacctgatgattatgtgtgctggggttgatcttcttgaggattaccttggtggagttctctgtatttcctgaatttaaatgttggtctatcaatctaggttgaggaagttctcctggatgatatcctgaaggttgttttccaacttggttccattctctccatactccaattattgtatgttcattctttttacatagtcccataattcttggaggttttgttcattattgtttattctttctctaatcttgtctgctttatttcagcaaggtagtcttcaaactctgatattctttcttctgcttggtcagtttggctattgatacttgtgtaggcttcatgaagttctcatgctgtgtttttcacctccatcaggtcatttatgttcttctctaaactggttattctagttagcaactcctgtaacctgttattgttataggagttattaagaaattattttaggcagatagagagaaaaaggggtcctgagaaagttttcatctcttttaaagccgttccagaaatgtttcttagttttggctgctgtactaaagacatggatttgaggcttgctggggagaacatggagaaccccctttacccacaggtattgggaatgttggcaatgtttgaactggcttcttttcatgggaaacctcagcatcatgtgaggctgggaaaatttctgaggcaactgagaatctcttaccagggcacaccctggtgtgattcataggcctctgtaccggacacagactccgacagcccagttgggtgttattagagcatcctcaactgtcctgtggcaaaactcttcttccttctctatctgcagcctcttgctctttctttgtgtgaaatgtgcaaggatttttacaccctagaaagagttttcccattttcccctgtggtgaggttacttgctaccactcctctggagcacacatagcatttctaagccaacagtgtcaactcgtggaagtaaatcaggctttaggcctcttctgggaagaggaaatttctgcctttagcagttaggggtaagatgtctcccatagccagattttagtgtcgatattgtccgactggaacaatatgtaggccattcggttcctacatttctttaaggcacctattttgtctcctattaagacactacttaattagtaaggggattttaaatccagaagttaaccagaaccattcttctatgagtaaatagtttagcatgggctataatagtacgatatagagttcaatgtagcacccttcctccttaaaggggccttgcacaattacgtgatttttattgaaattctttttttcggggggtggggggagggggaggcatacaggccacacaagtctaggaggtcaaagggaaacaaaaggcagaggactaagactgcttgggggcagcatgactaaggaacaaaagtttagttcctctggtgccatggattggagggtcacgcctgctgtaatgggcagcacatttaaatgggtgccaggattcaggagcaaaggagaaaaaatagtggaggggacaccctctactgttttcgtctccatcctagatcacataccaaaagcaaagagactaaaatacctcttttattctcacttctttttctagatgggtaacagatcatcttcaacatgaactcccctggagtgtattttgaagttctgggacttcttcgaccttgaaactttgaaaaaaaaaatagcttattttcttttgcacaagggtatggcctttttactagatctttgcaagtgttgcaaaatcaacccagccctttcagcagccatatggggcaggcccagggaaaatagtttccccaaatgaaaaaagtaactttcagggaaatcatctgaggattcccttatttggggccccttcaagtccccttctcattgcagggtcttaggcaagtaaagggagacttgggccaattttctgacgaccctgataggtatatagaagcttttcaaaatttaactcaggtatttgacctctcatggaggaatgttacggtgttcctcagccaaaccctaactgcagctaaaacaggcagcagtgcaagcagaagaaaattttggagatgagcaatatgtctcctatagtaggccaaaagggaaaagagaaaatgggaaaggcaaagaaataggaaaaacaccattcccaataggaaaaaaaggcaatatcttttgacaaccctaattggaacccctttctatggtgttttaccttttttggtggtttaaaatgacttatatctcttttataatgttcttccaatctggaaaaagttcccaaccttaaaatgcttgatttagatttaagctagggggaagggaacccagaagcctgatatgccagcaaagtggtaaaaatttcttacaaatggggcttttggcttctctccccctgtgcaaaccagtacaagggataataaggataatcatttatattctctgtaaatgtataattaatgaaaaaggatttgtgaagttggtcttaagctgtagacagtctggtgtgccttgcatgtctttctgtatggttctgtcaaataaagggtatcttaggttaggatggaggcccaggaccccataagtctgctgttcaagccagcccaacaaaatagtaacaaacttggctacaggcctccatcttgtttcatgtccttgggaacatgacctgtaaccgtgtggcaatactttgttttagcctccaccattttacaatggtggctgtctttttctgctaagtcagttcctgggtgagggccacaaaatcagataagccagtttatcagtctgggtggtgccaggtaatccatcaagagcagggtttacaaaatatcttatgcactgattttaaaagcaatttagggaaggtcaaaaatcttgcagccttcagctgcatagctcctgggccatagtttctaattttatggctagtttcttgggctggtccccagacaagagggaagtgtatcttaagaagaggttgttaacatctttgttttagactataaactgtaaaaccggttcctcccaaagttggttccacctatgcccagggatggacaaggaaagcttgggagctagaaacaaaatggagttgtttgggtcagatctctttcactgtctcagtcacaattttgcaattactgttttgaaagcttcctatcactcctttaaaaataccttgtatgcctgtggttaagtcacaatctaattaaagcttgtcagtttcacctgtgacttactttttgtaaagttcaaaagcagaaaatcttaactgtttgacgtggctaaagtcaaataacaagggatttgaaatgattttcttttcttttttttttttttgagacggagtcttgctctgttgcccaggctggagtgcagtggcgcgatctcgactcactgcaagctccgcccccagggttcacgccattctcctgcctcagcctcccgagtagctgggactacaggcacccgccgccacgcccggctaatttttttgtatttttagtagagacggggtttcaccatgttggccaggatggtcttgatctcctgacctcgtgatccgcccgcctcggcctcccaaagtgctgggattataggcgtgagccttcttaaagagtgctaggcttaattaaacatgggtattcaagttgtaggtatatttgaaaggcttttatgtttttctcttcttggatcttgtttttctggaaaaaggctcttttcttctcagttaaattggttaatccctttattaagccctctcttgcttatatatcttttattaatatttggaccctgtatactcaatactataatttgaattgctttttctcacctagaagtaatcaaactccaaatggtgctgcaaactgaactacgcatggacacgccattcttccgaggacccttagatcgaccccaggaggagtcccagctgctgttccccattcaacgcccttttcagcagcaggtagccagaaagagtcgtcgcccaaaaccccccagtagcagttagggtgacttctccatagggggcaaagttttaggaattattaagagattactttaggcagatagagaggaaaaggggtccttagaaattttttgtctcttttaaagcagctccagaaacgtttcttgtctagcagaaaagccccggctcttaagagccggccggcaacctttgatatccaaatgctgaccattagaaactgggtccacccaacatggtgattcccaccgttgtcctcttgcccttgcctccacatgtgcctggcaacatggctgcccgccgacatatccccacttttgtagaacatcatggccccctacactggcatattaaaaggttagggtgggagggccagttttttcgtgggtgaagtgaatgacatgcctggtcaaaccaataccctgaaccctatacaaatcagacacaacctcttccagcctcctcatataactggctgatatgcaccgcacatgaggtcccctctcttggctttggagcccctcctccttcggtctctgtagggggagcttttcctgctttcttctcccttctttgctgcctgttaaactctcggcttcttagaaccactccacaggtgtccatgtcattttatctaatttgacatgagacaagaaccctggtggtcctccactcatcagagctgtatcattgtcatgggtcttaagttatttgcattgggttaaaacatgctcctttagcctcagcaaagtttattacccaccttctgaagcctacttctgtcaatttgtccatctcatcctctgtccagtttggtgcccttgctaaagaggtgtttcaatcattaggagaagaagaggcattctggcctttgggttttcagcattttttcattggttctttctcatcttcatgagtttgctggttttgatcgctgaggctgctgacacttgggtgtggttttgattgggacttttttcattgatgctgttgttgctttttgtttgtttttctttcaatagtcaggttcctcttttgtagggctgctgtggtttgctgggggatcacttcaagccctattcatctggttcacttctgcacctggagttgtcacctgaggaggctggagagcatcaaagatgggtgcctcctccttcctttgggatctctgaccttgaggggcaacaagctgatgccagtaggaacacttctgtatatggtgtctggcgacctctgttggggtgtctcacccagttggggcacacaggaaccaggacccatttaacgaagcactttggctgtcctttggtggcggggctgtgctgtgctggggggaaatccactcatctgggctgcccagattcctcagagcgagcaggaagaaagactaagtctgccagtccacagagactacagtcatctctcctcctaggggctcaggcccacggagatcagaattctatccctgagcccctggatgaagttcttggagttccttcaggagggtcccacccagtaaggagggttgtgcaagggtctgacctgaacaggtattctggcaaccatctgccacagctggtgtgatgcactttggggaatacctcttgggaccaagccatccagcttccctggctccagcagggtaaaagcacagcctggagctatagtaatgactgctacccctacccgaggaaactcagatggctgagaaagcaggctgcagcaatgatggcagctgcccctcccttggggagttcttgtcttagggcaccgcagcagtggctgccattcctccctcaaggagctcagacagcttagacaacaaacagcagcagcagtggtgatggccgcccctccgcctgggaaatcagcaggcttaggcagattccagttgagtggctattgagaatctgcattactctgtggttgggagccaaggcccccagggcatgggctcacaagtgggattttctgaactctgggttgcacagttctgtagataaagcacatttcccaggctgggtagcacggtcactcactgcttcccttggatcaggggaggggctcccctgccccatgtggctatcagatgggctgaggcaccaccctgctcttcctttctctctgtgtgtcacaccagctgccaagccagtcttgatgacagaacctggatgccttggttgctgctgtgggattcacatgctgttttggttctttctgatggaagcctttgatttccactgcttctagttggctgtcttggcccagaccctccaatcttaactttcattatttcttctgtttcattctttgtttagctaggtctgtgtttttgatatatatacttttcctttatatctagaaaaatttcttttaatgtttcttacatggcaggcctacttgtgacaaatttcttcagtttttgtctaagaaactatttttgcttcacatttgaaggataattttctagataaagaattcttgggttggtgtatttttctcctcccctgcctcctcctcctccttgtccttccacactttaaatgttttaatccacctgcctctttttttacatggtttctgacaagaagtctcctgtaatattatccttgttcttctataggtaaggtattatttttcctttggcttctttcaagattttctcctcgtttttggcttcccacaattttaatgataacctaggtgtagttgagttttgcttgtttgtttgttgtgtgtgtgcgtgtgttttgtttgtttgtttttgtttgttttagcattttttctactcagagattttttgatctgggattgagtgcctattattaattttgaaaatcatcaaccattttacattcaaatttttttttctgctctgttccttcttgattctctttctggtttttcaaatatgtctatgttaatgttacactttaaaaaaatgtaacaattcttggatgttctaggagcccatcaagaatattcttcatttctactacagtaattttttttaagagacaagttattgctgtgttgtccttgaactactgatctcttgggctcaaagagattcttccacttcagcctccctagtagctgagactacaagtgcctggctcagtgcttttttcatttctagcatatcattttgattgcttcttagagtttccattattatattggagccctgctgatggaagtacaaaggagtattccacaatcttatgattatatcttagtcttttaaagggcctatgtccctgcactttgtgaccttcacaaatgtttactacctcttctgttctcttgggtgagacagaaaggcagatggggctagaattggctagaattaggggatttcccttcccctagttctgctaaggttccagcaaagtttcttctccaaagtttcctttggagagtagacctttgttatgtagagcactctggccatgtttccaaatcataacttttcctttccctgctaggaacacaaagggatctttgctctgagaactgttagagttcctgagagtaaaacccatataagtgtggagaccctcttaagacagggtcccccaagagtttctccttctaaagctagtccacattttatctccaacaatcaatcaaaattaccatgtaaatatgtgtaacagtttatggcttctgcaactcctgctccaagtaagttaatttctgctgtggttctctgtatttacctatctcttcagaccttgaaatgctgtttttgccttgtggcattaattaagtttaagaacagtcattgattttcagttttctttttcttacgtacagctgaaagtgatgatttctaagctttttaccagagctaaaagtactttctccattatttttaaatacagaaaccagaaaatatgcacgctctttttcccctctaaaataagtgctttctcagaatatggcatgctactggttattatcaaagtttagaattgttatcttaataagttttttctgtataatcaaatgaattatttcccttttcacagaaagttatttaataatgcttgaagctttctgagtagattttacttcttgtgtgttatgctacctctagtgtggacttgatggctgcctctatactatccatttaacctgcaaactgagtatgtagcagtctagcatcatctctagaaatgattctgatttgtctataatagttaagtctattccagttggattagtttagataattcaatcagacaaatcaaaagatgctttcttttctggctatgaaaaaaaaagtatgtaactatatttttcctggagtaagcctgttgcaggacaaaatttaaaagtagtgaatgtaagagatgaaaaaaaggccaagaaattataaaattataattgcccataccacttctgaaattctcagtgtcttagcaaatacatgttttcaaacccagtgttggattttcttttactaacacgaaacatatttttctgacataaagtctatgtcctgaaaaagaatgtagagtataatgaattgtggaaacattttcctgatacaagaatatacctgctttcttagaaagcctaaaatattcagaagaataattaaaagaataaaaaaactatatgaaaatatagcaaccaaatttaaaacacatctatactttaagaccattttccttaatctgaaaatggcatttgatacttcattactttttattgaatattttattttaagcatttttcaatgtgatttcaaaacagtcatttatgtcacttggaaatctgtttaatatttctctctttgggtttgccataatttatgtacctacaatggtcattttaacagtataggacagttaagtttgttcctatttcttgctattataaataactttgggccttcttatagtttatgttttacatcttgtctagaatagaaaactgaattattgcacagaatgtgtaatagtggtttaacattctagatctctatgggcaaatgactttttgaaatatttctgtcaatatcaatatcatcattgacaaataaaatggctcatcttggtgcatcattgctatcactgaatattactgccttgagaaatagaaatagattatccaactagaaaataaacatttaaaaaacaaaataaaaaacaataacatatgactgaatctgtatttccattattgtaaaattaaattaagtgataatttttaaactagtcgtctttatttttattgttaggagttgcctatattcttttaatgtgtttagttagattttaatagaaaattactcaattatattctttataaggagattttggtgtttttatagtctttttttgtgttttgagacaagagtcttgctctgtcacccaggctggagtgcagtggcgccatttgggctcactgcaagctccacctcctggattcacatcattctcctgcctcagcctccccagtagctgggactacaggcgcccgccaccacgccaggctaatttttttgtatttttagtagagacagggtttcaccgtagtcttgatctcctgacctcgtgatccacccgcctcggcctcctagggtgctgggattacaggctgagccaccgtgcccaacctatagtcttttaaaaatgtacttaacaaacgtactaaaacttggtcatatttattaaaaactttttgttgctaatttgcttttaaattatttttaaatcatttttagaactttcatcagaaatgtaataattttttttagaaagcttgaacaatgttgagaatcacatagattcggtaatcttaatgtcagaggaaatattttattgttattaatggtataattatgtacattatttataggatattagtcgttaatatgttgtgaatatttgttatgacatatatacagttattttttagtggcaacataaattctattttttgttggctatttcatgatatgggatagacaatttctgtattattactgcttttccaattttgagtagtctctaattttttatgatttaatttaatggatatctttttagataaaaatttgtacagattaattattttagcctgtggatacattgccagaaactgacttggttaattgaggattaaaagatagctacaaatgttacattcatgttatgctgtaaaaactatgaactgtttacctttctagtagtgttttagaattcctgtttccccaaaacctaaccccacattaaagattagatttttaaattttttaagtagaagctattatcatttttgtttttttttatttatttgatgctgaagggttttaaatatgtttttagctattttctttttctgtgtatacggaagtatacaaattactggcttatgccttttttactattagactattaataactacaaggactattactatcatatgtatatatatatatctaaattatctgtatctatcaatatcaatatagaaacgtactttgtagacaattctattttactttctttgttattgtccacttttgctcaaaaatttttaaaatgtcttaattttaaagtaaagcgcagacacagaaaactgtacaaaacttgtgtgtgtgtgtgtgtgtgtgtatacatgttttgtaatataacaaccaaatatatgtcttcataaattactagaggtgaatctagtttccgccaaacttccagaaattctctcacccctattagcttataaacattatacaatttgtaatagtaatcactcttatttttattattcaatagtttaaagatccttatgtgttttcttataaaatttactatttttcatttacaaaattaaaaagaatatatatatatatcttttgctatgtagttctctcccatccaaccatttcttcattatttgtctgtttattaacctgaagcatttgacttgtagagttttctaaagtgtgaattctattgatttcataacaatggtacagttcaatatgttccattgtcctctgtattttctaaaagtagacagtaccatccagagactgaatcaaacttacattagattccttcagtatggctatatgtggttagcaagacaataaggcacacaccatctggtcgtctctcgttttttactgttaacattgctatctatatatgacctatatctggtaatcaaatagggattggtaaataataatattccattgctatcacttctttttcctttattatttgaaatgcttttaaaataagacacttttactcacctattattttctaccagtggaaccatttatgaagaaaggccaggatgtttgattcttttgcattattgatcatttttgtgaataaagcaatgatttttctaacatcttccacaattagccaatctttttttctagtattttaaagaaataatagattcatatgtatgttcgaggacccaattcattgcagtttttattgttattgaagtagagagtgaaccacattcagccagttgggaatttgaagagtcagttcctaactctttttgaaatgtcagttgccttgataatttacttgctacttggaatggcaacatgttctagcctcaccatatatattttctgccccagatctggaactatctatttcaatcagaatccctgattttaaaaaaaattctgaataggaattcaagacacaatcaaggaattgctcatcttgtagtatttttcagtagaattagaaaataaatgtaagatcaaatacctcagcagttgttattgacgttcctctgtaaagactacagatatttacttaacttcttctctattacttctctattttctttcttcccctgaaaattgttgttctaaaggacaaaggcgatggcagaatttgaacatcattcaattatcctttctattttgtttggcattacacacacacaacaacaatctcagagaagcaatatatatagttgctgtcttaagtaattactgaaaatatttttaaagttttgcattgttcttttaattctctctcatttctatggttgtactatattttcatttcctgagcttatagccattatataactctctctcctttcctttaactctgttgtctctcttatgcttaattataattcaactcatattcctgcttaatatggagctatgttatagaagagagatctggaggtatattttaaaacaattttaggagctagatcctcttcagtccttcttttccaagattatcaatattatagaggacaaaacacctcagttttggctcttctcaaattgctcccatgtgttttccagtgagtactttggatatattggtattttctatacaagtttgtcagacagcaactctcatttttatttcctcagataacagtaatatgcaagacttattggtcatttggtttgttactgactcacttgtattttaaggtcctgtgatatcttttgaacctacttttattaatattattattgtatcagatatcaactcttgtattttatttctcagatatgactcaatggatatatgatagcctataaaacataggtggttaaaaatattactaatgataacacaatctatttctaaaagaaatttttttcatcctgagctccattgagtttatctgtctatatctagatctatacctatatctatgatataaacagtgatttctcaaaattcttacccatccataattgccatttcgtctgttgttgagagataggattcctatctcttgatatttggagacttgatttaaaagaaaaatctcaattattttctcacattttggtagaagttgccttttttgtgatgaacaaaatttatattttctagataaattgtgatgacatctttattaagtctagaaaagttcatgaagattgaaataccaatgaaaataattactgatatttcatatgtacataacttaaaatgtaaatgacaatatagtatttatttgattgctaaaattatgtttgaattaaaaaattatgcttaattaaagtgatacatttttatcaacaggtccttatttaggggcaaatatatttccagtgcttcatgggagcctaatgtatgctgtcataacttgattgtgaataaaattatgtggcatttgattcaggaaaggcaaagtgaattagccaaaataatttgaaaaactagtgaggggaaaatgtaacacttgaaccaaggaaggcttattaatgcacttttggtgtgaaagttgaagactctatgagctgagtctatatatttgaacccagcaactaactgttataaagattctatcctatttttgctgctacaatattaaccacaacgtggagaatgtttatagcatgtcctgtgcacacttgtctcttatcactcaatcaaggaccacttttctcaaattaaatttttattcttcataaccgtccttatgcataaaaatagaatatcaatagaaaaacttaaagtatgcataatctctatgcttattcctcatgtaactaaattgttcttcatagatctacatagtgttaatgacatgagaaaattaaaaaaatacacatgtaattattgccattttgattattttggtatgacaattcaagtttataggctaactttactttttctaaaaaacaccttcttacagacattaactaaatcccagtctcaaacatagtattttgtcctttgttatatcctgtattcttcactaaacctctgtagaaatggtgaaaagacatgataacaccagcacactctaggggtcttatagatttgcataaaccagattatagagaacaattacctaaaaggataaatgtgcctggataaagcactgagctgggagtttcaaggctgagattcccattgtctgtcagctacttggttttgctacttatttttccaacttttttttttctgtgaaattattttttcctgaagttttaaaataaagtgggcttcaggaaagttttatagtttttcaaatttatcttttctgttgtttttgtatagtgttcaagattatgtaacttgttttcttagattttccagctgtgtttaactctctactttaatctaaatcttcttttcttttaactcttgtcttcattctgctcaattatgatacaattctcataatttctccttagtatggaactctgttctagaagaaagacctgaagggacattttttaaaagttcttagtgaccagaccactctatcctcttcagttttgttttttgttttgtttttgtttttgtttttccccaaactaaccaatattatagagggggaagcctctcttcattttagctgctctccacaactacctgatgtttaggctcaaattttcacctaaagttggacaggagatttgaagtgacttggagattgatccaggaaaaagctatgactataggaggcagtaacacatgatgagttttactgggaagtgcttgaacaaaattgcaagagggggtaagccccttacaatgagaaattgtccagagggttacagtgagaagatcactccagacagagcgaaggttaggggaactcccagacaaaaagggactctgagagggccttacctgtctaggtgatgtcaatcagctgcacgatgggaaatctctaggtctgagagtcttaaaaggccacgaacctaaggccttagaacaacaagaccctatcatgttagtggctggaagattcagactgaagtgtcaggcaaagcagacagtctctaaatggctaaacatatgcttttctggactattttaaggtaaatatattgtgaatttggtgctggatgactttggaactaatgtatcttagccaaaagtgaaggcatacaaaacctagggaccagtagagaggccatctttggcttattaatataacaaagcggaataataattattgtcacatactgccacatgagtgttggaggaattaatgagataatacttgaaaagctttttggagtccttctcaagaaaggtaatttgttaatataaaactgactattaatacagcaagaagccttttcccaaagtagcttacacacaatcactgctgggtgtattcactgcaacagaaatgagctgctcatggagattataaacattcacattattcctttagattttattgcaagggcattcgtttacatattaaaaagctttaggaatattcttaagacatcaatttaaagcatggtttgagtagaattataaaatgaacatttggatttgagtacaattgtataaatgattagtttttcaaggattatttgtatttaaatgtcttgttatatataaaatgaggaaaatattcttaatatttcaaaatatgaaactgaattaaatattgtgttttcacatatatctaaattgaagctatacaatttaatatatatctaaatctgtgactatcatccctttgggggaatatattttccttaacatttgataataagagaattcagtctttgatatggtttggttctgtgatcccacccaaatctcaatttgtagttcccataattctcacatgttgtgggagggacctgatcacagataattgagtcatgggtatgggtctttcccttgctgttctcgtgatagtgaacgggtctcatgagatctgatagttttaaaaatgagagtgtccccacacaagctctttctttgcctgctgccatccacataagatgtgacttgctcctccttgccttccaccatgactgtgaggcctccccagccatgtggaactgtaagtccaataaacctctttcttttgccaattacccagtctcatgtatttctttatcagcagtgtgaaaatggactaaatcagtcttcatataaataaatcatacattagaaagtgtgtatgtgtgtgtgtttgtgtttctaaccaactttctctaattcttgtttttaagagttaagctttgtagtattatattattataaattggaagaaaattctctctctcatattcagtgagatttattgtgcaaatttaaagatttatgtttagtacacaggggcaacagaagtagcatggctagtaagtgcacttttatataatttatttacatttatgtagttaatgtgaacatagaatgagtgaaaagataatttaaataatcccacatttttataagctatatataatatatatttattattgactattttaagtagaaagttattattataaatgacagttaatgctgtatttctaatttttacacaattcatcctaaaatagtgggtatatgaagagaggagcaaacatcaagctgaaaaaagatgagtgaaaattgtatacttagatccagttgataattgtataggccctgtttattagttatttaccatagatgttagctttccactttctgtttttcactagatctgtgagcatcctacatattttcatgctgtattcctgagaaagattaacaggaaaatgggcactatttgtacctgtttggattctctacactaaatctacgtttgcctgagattttggcctacttatctttaaacctggtgatcaagctttaaatgataattagtatcaaaattctctattgccataaatacagatataatattaggaaattaataaaaggaattgaattaaatatttaaagagttttttctgaattcttactgaacaattaaacatatacttcagtaatgaaaataactagatagtaaccagatgaaaacatctaaaatcattctgaatagtcaaattaatgaatgatggttaacataatgataaagatggaatgaattttttcttatgtatatttttaatcaacacaatgatttataatgagcaacactcagagttggctgccccagtggaatctggggacacaaataatgaagagctgaagaaaaagattcaagaagatctgaggtggtatcttgtaagtgtcttatacaatccaggtttgtccattcagatctgtttgtgtccttatgatcatgcttctttctaactctacagagcctttgaattttgtgtgaataatatgcctttacttcttacctgagacataggcatacaaatccaattaagcatgcaagttccttcaagttggtgaccagtcacaattttaagaggattagtggaactcactacagtcttctttgctgcagctcttctcaagaccctgatagtcataacactcttccacaacctatttaaggcctcctttactttcacccagaatttctgttgctctgagctgcttgactggtgatatgacatcatccttgagaggtttgtactgttagctaccttgccttgttaacaaatgttggctgcaacttatcattttccattctttctgggcatgactatatcaataaatgcctcggaaggtttctaaggtccagaaatgcttcttcctttcctcactgtgtacagaaaactatagcacactttggtaaacagagttcattgcccaatcattttgtagatcttttctttttcttctggttcctttgaggaagccaacatggcgaaaaggtaaattctactcctattttagcataactcacaatgattctcttgagggaagtgttcttctcttaggaaccgagaccttgaacctggcagtgtatagaattgaaaagatgtgaagcacacactaaaatgatgatgatggcttttagatctattgatatagtgagtcacagctgttggggcacacacagcactatatatctgctcttgaatcagcacatcaagcacatgctggagacgatgcctcaaccctgcaggctgttttgttcatgctggctccatagaagacactttaactgtccttacactgttcttaccagactgactcgttttaggacacattataagacatacatatatgtgtttgtatgtatacagacattaagatatgttaatttgtatataataatagttaataataatatacaaattagtgtgatatatatcacacatattcactaatttatgtcattatttattacaattattattatatattatattatatattaatatatatataaacccttgaagttatttcatcattattataccactttttggtcataaaatctatcctcttctctgaagtggtgtcatttgtgagacactgcataaacaaatcattcttgagccttagatagtggggaatgtggaggcattgcatgagtgtcttagtttgggctgctataacaggataccatggattgggtgggtggcttaaaccacaaacatgtatttctcatgttctgcaatatggaaccaagatcaggtttttggtgagggctttcatcttggtttacagatagctgtcttctcactatatcctcaggtggcacagagagagagctctgattctttcatctccttataagggcaccaatcccaacatgggggccctaccacaatggcctcatctaaatctaattatcttgcaagggcttaacctacaaatatcatcatattggagattaaggcttcaatatatgaattttatggggaaacagacattcagtctatagcaataaagaagacaaacacatattaagaatatttatcaattatggtaaggattgattgctgtctgctccaggatggcagaatctaacatgtgacataccaccaagtggctgaatagttcactattcagttgtttacagctgatatctgcagtggtgacattgacattgatcagtggcattggttagaattagctctggcaggatgaggcctatgcactcaggccatttcatatttgccatccttgacactatgcctctaatgctaatggtctcattgtgccaaagctgaagtagctgagcaaagaaaataatcagcatctctgtctggtggcagttgggtgagattcaaatatctgtacatgttgtgcgtatttctacatcttcttcttagcccatcatgtccctcatgttgcatcaagttttgctctttccaaaccctcattgaaacattcagttattcataatgagatccatatatatccacacttttaggcactttctccttctatttctggatttcaaatccataattcatctgtgaaccaggcctacatccattccttctctattagttacctctagagaaatctccttgagaatatagttgagacaaatgtaacagggtggtttgcgcttcttatcacataatttacccgtatctttagacctgttctgtcctgatctcaaacaaaccaccttaactgaaaagtttattgtttcaatttctgcttaactttgtcactattgactctaatattgccactttttgatgggctgacataattgcatagtaacttgatgttccatgttcaaatgctcagtattaagcctgtaccaagttgaggagttatttttaaaacagtgattaattctctgatgcagaaatcacagccttgtttcagaatcttaaaatattgtacttttactctattactgaagcttgttcagggaaaaacatccacatttttgacagatactaccagacacgagatctgcagggttacatggcccaagtgttaatgcagcttgtaacatactctcaccatgctgcagaacctactgttgctctggacccctcttgaaactgtcagcttttaaatctatcaaactgtttacagtagtattccaaaatacattataccatctctacaatccaaagaggctcactaagtgcagtggtaggagatatgaggttaaaaaaaaatcaaagagcctccaatcttagtaatccctacatgttccagacaaatggatttctaaaatctttactactgtaatagacttctaaatattcagtgaatttgtttcctatctcgtggaatgcatttgttttagtaagaaaatttaaggtattcactactccttcttattagaaacagttaacacgatgtagtcaacataatgcaagagcgtgcagctattagaaatgtcaggaccaaggatattgactatattatgacagaaagcagaagtttttaaccagttctggagcaagacagtgtatgaggcactgtataggtactctcgcccttttttgtaaagattaactggctttgattccccctaatgttacgtattcagaagcatttaccagctcaatagccaaatattggatgggtctgtttcagtatggagatgacatccagtacagcaagtataggtatggctactcctagttaagcttaccataatttttaatcgcatgcatttttttcatagcaaccagagagattaaatgaatggagatgaatgggagccactccaccattcatcaaaactttgatactggactcaattgtgaatttgtcttgaaatttgataatgcttttgttttactgttctgctcagcaaaatagtacatgttttactgttttcctaccttaatgccctttcattctgcaggtgagataacaaacattggatcctaaatatatcactccaagttggacccaatggatgtaggcttgaaccaaaactctgttcatgaatagactaatgagaaaatctgatagtgttctaggtcctagtgtaaaagctatttttttttttaaaaaaaataacttttcaagagatggaagacaaattacataaagattcagagacctattacctaagtaaagattttaggaatcttcttttctggagcatgtcaggattactaaggtaagagacatttttctttttaacttcatatctctaccactaaggcacaaaacttagtgaatctctttggattgtagaggctatatattttggaacactgttgtgaacatgttggtggattttgaaagctgatagtttcaagagggtcccagctggatgggactgccctcaacttatttctgaggaagcttaaagttacggaactgatccttagccaatataatgtcaaatgggctaaatgatgatttataatatgcttttcaaaattccaaactctcatagtgtgtaccaaggcttgctggcttacacctgacataatctgttaaatagcctcccttggttatgtgagaagaagaacaaaaaagacctttgtattagttcgttctgacactactataaagacatatctgagactaagtactttataaagggaaaaggtttaattgactcagctccacatggctggggaggcctcaggaaacttataatcatggtgaaaggcaatagagaatcaaaagcacgccttatatggtggcaggcaagacagaatgaataagaaagggggaagagcccttataaaacagtcagatcttgtgaaaactcattcactatcacaagaacaccacaggggaaacggcccccatgatccaatcacctcccacctggtctcacgcttgacacatggggattatggagattatcatttgagatggaatttgggtggggacacagagccaaaccatgtcaatcttgttgaacacttttgaagaattcccactcttttaaaagcaaaaattccttacacaagtcttggtcattcaatgtctgcagataaagaaagaactttataagaatgaaccctgggagatgtgcctcagtgttgtttggacaatacttaccaacactcattttctcttcctgcatcatattgtcttcagccaagccttataacggtatactctgtggagatgagtgagttaatttcattattggacttgcataatatctgtagttcccttgccccaatgtcaatcaagatatacaatctaagagttaacaaccggccagtggtccttttaggtagaatcagggactgtctgtcatatatacatgcagtgctatttaaatttcttttctcaaggggattcagcacttttttgctcaagaagctctgggactaatttatagctggatttttaatggagatacatgtttgtgcagtggtggactttagccttttgcataccagctctggttacttatttacttatttgttgtaatttgtatttgctatagatttctttattattcttgaacttatagaattttagaaactccatcattacctgtgtacttatcatgcatattagcctgctgtatcaggtcactcatggacaaatactctgtcactttagcttttctgttttctgtagctatcattgccaccttgctttcaacagttaaaggccaccattctgaagtcctcaatatcagtgatattatggatccaagtttaatagcagcagtgcttactatcaagccctgcatattgaggacagccaccatgaagtctctcaaagatatcagtggtcccccccaccagggaattcattattgcctcagtaaaaggagtatcctctggggccttctgggaaacatagtcaacgttctgagatattacatggtgaatgtattctaaaccttatttcttcctcatgctccaacaaagtggtttgactatgtttccttttttttttttttttttttttttttgagacagagtttcgctcttgtcacccaggctggagtgcaatggcgtggtcttggctcactgtaacctctgcctcccgggttcaagttcaagtgattctcctgcctcagcctcttgagtacctaggattacaggcatctgccaccatgctaggctaatttttttttgtatttttattagaaaaagggtttcgccatgttggccaggctagtctcgaactcctgacctcaggtgatccgcctgtctcagcctcccaaagtgctgggattacaggcatgagccagtgcaccctgccatttttacttttttttattctacacatcttcaagatctactttcaagaagacattccagaagactattaggattaagtccaatttttcctccagtacatagaaactttagtaacagggtggccatatcaataatttctccaaaatccaggcttttatctcacatatattgttcccatactcttccaatctaatcccagtgttggcccactttctgcaggacatatttccagattctgttttctctttggcaaataaactatttcttattggtagatggaccacactgatccacataaactctccaataggtgaccctgactaatgaccagaaggcaatgaggggtggtagagacagatcttgaagagaataaacatcattttgtgaggcattcacttctggtgagaggttattgcatatgtttaactatgagagcattttttacgtctaatactaggaaggaggagctgtttgttttgttcagattgttcaggggaatatagaagttcaacattatcaggctgtaccatctatcaccttgccaggtctcaagttcaaaatatttacctatcagagccttagtataatatagaagccttgtcaaggctgcccattaattttaattgtaaactttgctacttttacaataagatctctggctgacattttaatagaagctgccctcaacctgtaagagaagagagtctacataaaagctgtcaccatagctctttgctttcacagttttacaacacaccttcaatttccagttggcttcccgtagcctataattttctttctgcagggccttccaatgtaattaacagaagccagtctagtcttcagtctttatcattatcattgctctcatacaattcaagtgccatagtccacatatatccaacacttctccatccacttctaccttgctcctgttaatcaaaggtgaaatccttagcacttgtgatgtgaatacatggcatgttttatcaccagtttatttctggcatccgctgttttatcgtaggcttttcaaatcgaacttgaggcaaatgctcataggctactttaccagaaagtacaatccaaaagaaaccagagaggggaaatacatgagtgaggcagagaatgctagacaaaaaataaaaccatgtgttaccagagtgtatgccactattttgtctcaagtcagacctttttttttttttttttttggtgagagaattatgtgtttctttgcctataaacaatccagaactggagtggaaggagaataatttatccactggtttctacctctcattggttaaaactttgctttatgtctccagtgtgtgccagggtgaaggtgatatgcatatcccatatatttgtctgtcttaaagttaacaggactaagccgagggggaggtgtgggacacatgatatgaacatgagataaattgatattgagctgtgctttctgcttaaaccacagcttgattgagccacaagagattgttgctgtggttgattggtgtaatacaagttggcaagagctcttgacatgtaaatctcaaatttatgaaatggtgtaatgaacaaaccaacaacaacaaaaaatagttatctttccccacactgtgatacccccttgattcttacctcccaagggcaaaaactttaaactctgtttagatttttcttatggtatctagtaaaacattttaaagaacatacttactggtatgtaggcaaacattttaaaataacatgttgctactcttcttcctttttttcctcttaaaatattaggtattaactattgactgtcttattcttaaactgagtattagctctgttgacctacaatgctatgacatccaacattcacacatacacataaaaaatgcactcgtgctcgaaaacacatagacaccaaagcacgcaaacacacataagtctatgttctactcattctataaataggattttattacacattttgtttttgaatcagtattatgaccatctaaatgctactcacagctggcccacattctggtaagtatcttattgctgttacattgaggcaggtttaattcacttacttgcatagtttcctctaaagctgttactcatttcacatcagacattaaaacaaacaaaaaccaaaaacaaaatcaaatactcagacacacacacacacacacacacaacatgcacacacacacacacagagctataaaatttccctcaatttcatttaaaataaaaacaacctccactataatccatcatccttactctacactcaagtgcctgacagttacacatggctggggaggccttaggaaacttacaatcatgacagaaggcacctcttcacagggcagtgggagagagaatgagtgcaagcaggggaaatgccagacccttataaaaccatcggatctcatgagactcactcattatcataagaacagcatggagaaaccaccctcatgattcagttacattcacctggtcctccgcttgacatgaggggattacagggattacaattcaaggtgagatttgggtgctgacacagagctaaaccatatcattcagcaaacctcatgttgaaatttgatccctaatcttggcgatgcggcctaatgaaggtgtttgggttatggggacagcccctcatgaatggcttagtgccatcctcatggtaatcagtgagttctttctccattagttcctgcgaaagctgatcaatacaaagagcctggcatctcccctatctctcttgcttcctatctcaacatgtgatctttgcaaatgctggctctccttccccatctaccatgagtggaagcaacttgaagccctcaccagaagcagatgctggcaccatgcttactatacagcctgcataactgtgaaccaaatagacaactttaaaaaaaaataaatcatccagcttcaggtgtttcttcatagcacgaaaatagactaaaaccagtcacattcttgggccctgtagtttctgttcgtttgttttacctcacagtttatggtggagtatatcttcttagaaatgatgattatcataaacttctcggtaccttgcttatctgaaaatatattcatattcctcctatatgtgactattttgcaagtagcattctgcctactcatttagcacatttctattttccttctttttttaagtaagtcttctttgtctcatatttgatcaggtcttccatctattttttatgtatatataggttttattccctaccatatttagagtaggaatttaagaaggagtgtacattaatatgtgcatcaatcaatgtttaatcttaagtttatatctttagaccttttaattttcaataaattctgaagaaggaaaagctgctcagagaaatatatgaacttgttaatgtcatcaattaaggtactattttgttttccaataggaagttcacttttttatatctgatttctcaaaataccctatataaagtacatgccagaaaatgagatccaagatcagcaaaatgtaaaatcaccacaattcattgggtttttattatcagttgaatcagcaatttctgaatcatacaaatatgcaccaaaatcatttgataatttcttcaatagttatatcagaatgcaagtctacatccagccatcaaacaccatctagatattaatatttttagaagttgcaagcttaaattgaaccccttaaattttcattttctctcaaagtctcctctaaatttagtatattcgattaggcaaactatgcttgactttcttgattaaaaaacagtaactataggacttattgcagagtcagaaaacataaaatgataaaacacaatatttaaaatgtattattatgacattattttttgactatgggttaaaatattagctactaattctgctatgaaaatacagtagcctttccttatctaagggaaatacattcaaagacccccagtagactgctgaaaccatggctagtaccctatgtataccatatgcacattaccttttacttctttactatttcatggatagcaggtttgctctaaccataaatcttagcaagctcagcatataatatcaccccctccttattaaattgagaactttcaccttttcacttaaaggacgcgcttcatggcttttctctggcatatccaaattgccagtattgctactctctcactttgggccagggctgtggccattattaagtaaaacaagggttatttgaactgtgatactgcaacagttgatggaataatagagtcatttactaagtgactaacaggcagggagcatctacagtgtggagacactaaacagggacagaactagatggcatgggatattatcttcctacccaggaagacactatttaaaatttggaagttgttcatttctagaattttctatttaatattttcagagcttggttgaaacttcaggaagcaaaaccatagataaaggtgaaccactgtagacataaaggttgatacagttgatgggaattttctttgagtatcataaggtcaagattgatttgctgctttttaaaatatgcagtggctattattaaattcaatttatgagtaacatcaactctctgaaaatgcattattttgtaagaatgtatttgctaatttttgaaaactaagactgtgatagcattccagaaattaataattatgcatacatatataccaggctagatattgtcaaataatttaaccttttaaattttaaaaatatgattttcctgaacatttaataagctaccaagaaaaaaaagtatttaaaatagaattaattcaaaatattttccaggagaatagtatctcgataatatcagggttggaaagaccatactatatttagttgcacaatagaggattagaaacatctttctctgtgtgctcacaattaagaaaatacagtcttcttaaaggatttgctaatttggttcagcttaatttcattcataactctttagaaacaatatattgatgtgacagtgagagatttataaaaagtatttttttcttccttaaacttagttttagaaagccaaattataaaatactatattctaaaaaagtgatatgatttggctgtgtccccaccaaaatctcatcttgaattgtaactcccacaattgccatgtgttgtaggaggaacctggtgggaggtcattgaatcgcaggggctggtctttcccctgctgtccttgtgatagggaataagtctcatgagatctgagggttttaaaaacaggagtttccctgcacaagatctcttcttttgtctgccaccatgtgagatgtgcctttcaccttccgccatgtttatgaggcctcaacagccatgtggaattgtaagtccattaaactctttttcttaccagtctcaggtatgtcactatgagcagtgtgaaaatggactaatataataaattagagcagtagagtggattctgctgaaaaaataccccaaaatgtggaagcaactttgaaacttggtaataagcaggggttggaacagtttggagggctcagaagaagacagaaaaatatgggaaagtttggaactccctagagacttgttcaatggctttgtccaaaatgctaataatgatatggacaataaagcccaggctgaggtggtctcaggtgaagatgaggaacttgtttggaactggagcaaaggtgactcttgttatgttttagcaaagagactggtggcattttgccccttccctaaagatttgtgagactttgaacttgagagaggtgcttaagggtatctggtggaagaaatttttacgcagcaaagcatacaagaggtgacttgggtaccattaaaggcattcagttttaaaagggaaacagagcataaaagtttggaaactttgcagcctgaaaatgtgatagaaaagaaaattccattttctgaggagaaattcaagccagctgcagatatttgcacaagtaacaagaatctgaatgttagtctccaagacaatggggaaaatgtcatcagggcatatcagaggtcttcatggcagccctctcatcacagaactggaggcctaggaagaacacatggtttcctgggccaagtccctggtccctgtgctgtgtgcagcctagggatttagtgccctgcatcccagctgctccagccatggctgaaaggggacaacatagagctcaggctgtggattcagagtatgcaagccccaagccttgacagattccatgtggtgttgagcctgccagtgcaaaaaagtcaagaactggggcttgggaacctcctcctagatttcagaggatgtatggaaatgcttggatgtcaaggcttaagtttgctgcaggggcgaagctctcatggagaatctctgctagggcagtgtgaaagggaaatgtggggtcagaacccccacacagagttcctacttggtacctcctaatggagctgtgagaagagggccactgtcattcagaccccaaagtggtagattcaccatcagcttgcaccatttgcctagaaaagccacagacactcaatgccagcctgtgaaagcaactggtagggaggctgtaccctgcaatgccacaggggcagagctgcccaagaccatgggaacccaccttttgcctcagcatgacttggatgtgagacatggagtcaacagacatcattttggagcttgaagatttgaccaccttgctggatttcagacttgcatggggcctgtagcccctttgttttggccaatttctcccatttgggacagctgtatttaacaaatgcctgtgcccctattgtatctagaaagtaactaacttgcttttgattttactggctcataagcagaaaggacttgctttgtctcagatgagactttggactgtggacttttgggttaatgctgaaatgagttaagactttgggtgactattgggaaagcatgattgctattgaaacttgaggacatgagatttgggagggactggggtggaatgatatggtttggctgtgtccccacccaaatctcatcttgaattataacttccacaattccctcatgtcatgggagaaacctggtgggaggcaagtcaatcatgggggcaagtttttccatgctgttctcatgatagtgaataagtctcacaagatctgatggttttaaaaatgggagttcccctgaacaagacctcttctcttgtctgccaccatgtgaaatgtgcctttcaccttccaccatgattgtgaggcctccccagccatgtgaaactgtaagtccattaaacctctttttcttcccagtctcaggtctgtctttatcagcagcgtggaaatggactaatacataaagtcaagttgaattttttggcctgtgcattttgcaatatattttaagaacagtatcaatttctggcttcaaattgttgtgtatatggattattagaagtattacatatgaaaaagatttaaatattccattgttaagaccataattataaacatgagacatttttgtgtgacaagctccttttagagaagacgtaaaagcataataaaaggcttcttgtctaatacagagcaaatattttcagtaatggaaagaaggagacataatatctttaacttatcttaatattacctttttattccctgtaggaaaatgaaatagccagttctacttttcaatgtaattgttctaaatgaattcaataaaaatagctgaaatatgttgatgtctttgagaatcaaaattttttgttttcaagtgggtgactgaataatttatttcaatatattcggtaatagctgaaatttttaatttatttccttcacattttcgactaactttatcctaatcccgaaaattttcctttagtgataaaatgcactccaagttaaacatgttcaacattgattcaagtttatagaccattttattgaggcttcaatagtgtgaatactcacacacacacaaatactctaatgatttattacattacagtgatgctgagaacaacaataatggatctagaagtctatggccttttcaagaatatatgaaatccttttggatgaatgattaacacaaagtaagtacaaagacagatggtgtatgatctttgacattataacatgttagtatttcagactggtttattatagaaaaaggtcagtcaatattagagacagcttgtaagagaaaatgtagtttgaaagactctgaggaaataaaagttgagaatgtggtaggacctctttgagtattaaccatattatgatagcagatgataatcaaatgtattgaaaagtccttaaagtttataaaagaataaagatattgttcctttgatgaaactactagagtattttaaggtattttcacttccaattgatttaatacataagcttatataatttttaaaataatattttatgtctgccttttcttgtctaacttcactttctcttttgataattacattatttctttgctttacacaatgtgcggtgttgactcccaaacatatgattttcagctctacaatctctccacatacctaccaaatcacatgtacaaatttctttgatatttcgacttgaaaatataaaacatcttaatattaacatggacataaaactcaatgattaattcctgttctccatgcaatctgtgcctctcagattttcctaattcaaggaaaaaaatcaaggacatattcctgattctctccttttcttaaatttctagctcatcattcattatgtttttcaatatctatctttaaaatatatatcaaatttccacatatattccatctaaactacaatcattcacactgtttgcctgctagattactctaatgcacatttaatgccctctctgcttctaatcctggcatttccagttcattttttacatgaccagatattgtgaacttttaaagcaaatagtgtatgagatttcatttgtttcaacggtttctcaaagcagtaagattaaaaccccaacactttaattgtattacaaaacctacataatatggtcccacctatatcttcctgaactgcctacttgcctgtgttgtcactatttttttcagtattttttcaatggcattggcttttgtaaatgctctagatagttcctggcctagggcctttgtaatagattgctctcttgaaatatgcttttcctgatcttcattgagctgacatcttgcctttttatgtctgagtctttgtgtcctcatcagaaggttctttctgtaaccaacatctattgtgaaattattacatcattctgtctgactgatcagcagaacaatattcactttctgatatatgtattttaatttaatttgttgatttttaaattaatttctggctccagatgagaaaacaaatcactagaatatacaaaagtgaaataacaaacagtaaaaagaaaatatgagactgggaaattatgccatgaaaaaagagaaaacttggagttatactacattgaagacccaaaagattagtgccgaagccaatactttagatatttgtatccagatataaattaacttggatgtttgaaagtgaatttctaatctttctccaccgcatctaatctgttccacttttccatctcaattgacggctaatacatcctgttagttttcccgtcaagttccctttgagttacctttgacatctccctttctttcgcaatctgtatctcttctgcctgcatgattttttacttttaggatgtacccagaattttatcacttatcaccacatccattgctctaccttggattaaattttcatcctattttattacctgaaatagcattcagggtttcaaattcattcatttctaagtcatattatgttttccttttgctcaaaaatcattcatagatttcttatctcactcaaagaagaatgaatggctataaaaatggatgacagggatgatcaggaaacagcttccaactcaaatctggtgtcatcttccactgggtctctgatcctgatcacatgggcctccccaatcttttaaatcaaaccaagcctgcccaaaccttcaggacgtgttaattcctaggctgtctatcttaaatgttctctcctctagtatttacctgacttacttatcaacttcaagtcttttgtcaaatgtaacctgtgaaagaggcataaccaccatatttaaaattattctctttccctactcattggctctccactttgatagtgcttttcaccatctaatgtactacacttgttattcaatttgtttacattctctcactctatcaaaagaatataaattgtaaaaaggtagaaatacttgtctgttttgttcaactctttatgcccagtgcttagaagagaggacagcaactactagacgttaaataaaaggctatacagttacattcataactgaacaattaatgaattaatctaacacacaatgtgaaaattttaaaagagaacaaacttaaactttataaaaagatgttaaaaaatatacatcaataacattcaatccccttttgtggataagaataatcaacactataaacatcaatcttatcaaataagtttatagaattaatgtcatttaaatcaaaatggcaatagcatttttttaacttggtaaacttattaacattacgtaaaatagcaaaaaaaaaagcaaagatagtcaagatacactcaaagaaggatacactggtggcatttgctctatcacatagcaattgtaattatacataaacggtgtggtaggcagcatctaagatggaattcaatgattgccacttcctagttttcacatcgtggtattcatgccttatgtaccccttttgtaagtgtttcgagggtttattaactcgtgtgtcataaacagcacagggaagatacaaacgtgatgtcactttagagaacaggtaattaaaagactggttttgtttgggcatgcaccccctcatctcccttagatttctctctctctctgggaatccagctgcattaggcagccctggggaaaggctcaagtggtaaaggaccaacttaggacctggatcctccccgaagttgaacagtcaaatcacactgcagtcccagtcaatgcttgcaatacatcctcatgacagaccttgagccagaggcacacaatgaagtcatgcttggattgctgaccaaagattgttgagataataaggttttgttgttatcagagtttaagatcgaggataatttgtcatgcagcactagatgactaaatttcatagtagtcaggaaagtcatatgataaggtcatctatacatgttaaaaggaagaaaacatccagaaagatatctatgcatcgaaagaattttgatgcatagatatagaatttaaaatagatgtggaattacagattttaaaaagaaagtaattctgctgattgctgacttgtgtctaattgaatttaaaatatgtgatatttgtcttttaaaaatgcataagtgaatggaaaaataataaccaatcaagagtgccacttatttccttggtacttatgcattgaaggcttattcccagcttgtgaaaggtcgaatcattatggcaaaattctcattgttactggaatatcaaatgatttagcatattggtactgacagaagaatttcattgaattatcagatgcactcaaccaaaatttaaatacaacaaaaccaattgcatgtctgttgcttcatcgtttaagctcatttgtcttaagtacatgggaaaaatcaaggaaaaagtcagaaaataattttactcattcaccagaatactgccattatttttgtggattaaaaactttataaattacctgatgttaatggcaacagtagtcttactagcctaccataacaaatagagcatgaatacctatttattacctactatctttataagtgtacatatgtttttacctggttaatcattgacattcactggaggatgcagtggtcattggcaccaaggatcacatattttacacagaaacttgagcaacagaggtcaagtaccttatcaaaaatcacacaataatttcatgtgtaaaagaacaaaaacctgttccatttctcatgaagaaggcaaattgctttgttattatatacaaattctttaaaaattaaatgttacatataaccaatcactgtttttggtcactaatttttgtgttaatgtcaataaactatgaacttagaataaatttctaaatttctattttctttctatacttgtctattctcttaggcttcatgtttctgtaacataggatataagcatcaaaataatatccaacagtgtaaagtttctccattttaagtcactgaatttatgggctataaaaataagagattaaactatagctttgtcagagcataaagaaaagtctcaaagtatctgacctcgtcaacttaatatgagttagtatccataaagaatgatgaaaagctattaattgaaaaatatgaatatataataaaaaatttaatagcagtttaaggttctcatcatctgttgataatgtataattttaggaattattctggcaaattgtcaggcttaattttatgatagagatattgatttacatgtaattatcttagcaatatattttgcaattaaatatagagtggatttagcttctttgacaacttccaggaaacttggtagcatgagactatacatatataatatttgtcatatacaagtatgtatatatattctcgaccttgccttcttcagaaaatgattgatggaaattctaggaattaatgttcttataacaggttatttaaaagaaattcctttaatttcacctatgatgcaaaccgcaagacaataaaatatcagctattcttatatgaaagtgaggtaagttcattcttcaggataagcaaagaactttccggtaaatgagtctgtgactcttctaacatcactcacattcaggatacaaaatgatcaggactgggaggttacaacagaacgtggtccatgaaagaaaaatcaaacaaattagattttatcacaacagactggacttgattaaaattagaaacttttgctttgcagaagaccatgttaattagatgaaaaaccacagaatgggagaaaatatttgcaaatcacataactaacaaaagatttgtatgtgaaatatataaagagcactctacagtcagcagtaagaaaacgacaatccaattagaacatgtgcaaacaagtttaacagacactttcatttaaaaagatagacatttagaaaataagcacattaaaaggatgtttaacaccaatagtcatgaggcaaaggcaaactaaagcttaatgatatgagatatcactactcacccattagaatagctgaaattaaaaatatagcaattgctggtcagaatacagagaaattgaatccttcatatgttgctggtaagaatgtaaaatgaaacagccattctggaaaacagttttgtagtttcttataaaacaaaactatacaaatgccatacaacccagcaataacactgttgaatatttatcctagaataattaaaaactacgtttccagacaaacctgtacatcattgttcgtagcagtttggggctcatacaagttccacactggatacaacccaaatgttccttaatgggtgaatgtacaaattgtggtagacacatgcaattgaatactacttggcaataaaaaggagggaactattgacttacacaactttgatgtattttaaagtcattagattgatttttaaaggccatccctaaaatttactttatgattttatttacataactttcttgaagttgcacaatcgtgtgaatagagagattagtattttcatgggttagggtttgggggcatttttaacacaaggaagtttctttaagatgatggtacagtttttgttttctgctgtgatggtgcatacgtacatctatatgtgtgataaaattacatagaattatataatataaatttgcatgtaaaaacggaaagactctgaataagatctgtactcatgttcatagaattgtaccaatgtcaatttcctggctttgacaatgtaccatggttatgtaacatcttgtaattgagggaatttgacaaaatatattgataactctgcattgtttacacagtattttgtgtcattttcaatataaaaaggtataaaaatgactcactctaaaatccaattgaagtgttaaaataatcatgattgggtatttatggttgcattggttctattgattttcacctttacatttgtgaaaagtttgtggtaacaaagtgtaacccttcactgtgtttgcatctctccccctcatgccctccctgctccaacaataatggaggttagaaggtacttgtttctcccttcaatcctagaaagtggagctttgctgagaccacatggaacacttgatatactttatttgtgttttgaagaactcagaagacctatgactgactcccccttaaacatggttaatgaaagagaaggtagctgagtaggttctctcctatgggagaaagaaaacatggactgcgttatggctgtcctgttttcccaacatggatccagagagagagattgtatgagagaaaaagagtgcagaactaggatggagtctggtggaaataattcatagaatatcaagtctaaaggtttccaaagttattgcatctttcaaattatgtttggcatataaatctaaagctgactaacttcatttaagaagtaatgtcatttttatgtggttacagaaattccaggaatatattatgtttgaaatacataatttccgtaaattccaggaatatgttatgtttgaaatacacaaaggattactgtgagtcttaagagtttttgtttgttggttggttggttggttggtttgttttccagccaggtgtggtggctgacacctgtaattctagcactattgggggccgaggtgggcgaatcacctgaggtcgggagttcgagaccagcctagccaatgtggcaaaaccccgtctctactaaaaatacaaaaattagcagggcatggtggcacacacctgtaatcccagctactcaggagtctgaggcaggagaataccttgaacctgggaggtggaggcagcagtcagttcagactgcaccactgcactccagcctgggtgacagagggagactctgtctcaaaaagaaaaaaaaattcttttttttttttttctcctctctctactactctaaaactcctgggaccttttactgtctttcctgttctcctgacactccatccctggaaaactaaggtttcttttctgactgcttcctttgggttctacccgatttaattggtgcatttatttctttccattgagagaagagattaaaacagctcaattttcatgtccaaacactcttttacaagtgtagaaaaaagttatgaacactgacacactgatatttttattcttcacatttacctgttaattggtgaaattcatataatttttgaatttacaataattgtatttgggaatttttggccttcatacacattacttttctcatgctacacattattcaacagtaaatttgcaagaacctgagtaattcctgaaattctaaaataaatgttgatcagtgtctatttctaacatttactactgagacctttatttaaatgaaacaacttaaagattatgagccaatttaaagtaattgaacagtaataaggccgtaactttaatgtgatcatattaaaggtaataattcatttacaagcttgatttgtattattggtagtatattatttctaaataaattaacagtaaatttccgaactcatttattagacactttaaaaagccttgctaattctactatttatcatttagattttgtcagtattaaagttttatttgtatcatcttttgaaaaaatatttgtggtatatgagtataattaatatactaatgggaatagttagtaccccaatcagtaatgtaaggcaccagcataaaaattaagtgattaaaaaaatctacttaagaacaaataaaaataatatgtattttagggctgataaaataaatttcatatattttaaaaatgtttatttttctaattatataaaccactactaaatacataattaagtggctaacactttctccttctggtaacagaacatgaataccttttaatacttcttaattacagtataatattttgttcttaaacttaggatttgttgttttcaaagtaatgttgaaaaataactgtatctgttattaattctgagccatcttacaaaattgcaacatgctaaaaagctttatgtttgaaggctgtagtagtgaacattctaaagttgacataatacctagtgtttattcgctccttaataacgttaagtattaatcaaaatttctgaacttgcatatcaattttccatgatagcatttagcaaattatttttgacttgttttcctctacattattttaaaatttacattctattttaaaataaataaggtgagaaggcttgatttaagagaatatagaaagtgtggatggtattcttgaccaaaagaacgtcatgaatgagatgggctgttctagactgcatgggaccctaccagtgatgaagataggactataggctgtcatgtggttgtttgttccatgccaagcagctttgctttgatctctatcatatattggctgctgcacgcaattccacttggggaaaacaaaaaacaccactgaattctcccattggcttaggagttaatctgcattccatgaaggactcctagacttcatgcagaatttggaagggtcaaattttttattctgttgacctaatgcttcgtatttttgaaaatcttattctttggctctttacttcctgtggttttgattactttcatgtttagtaaatatgactttttttttcttctaatgataaattcttttctttaaatagaaaaaaattataatactaacaagcaaggtattgtagcagttaaaagacaaaaactttcaggagcatttttgtttcactttgttttcctttgttttttaattgttggctatacttacaaagaattagaaaaacaagattaggaatgtaagtaatttaggagaaaatagtctctcagaaacacatgcagatttagacacaaaaactcagaagatagcatagtgtttagtctataattggtattctttaaatttcttattttatcgtttttgtttgtttagttgtttatactttagcagttttcttctgacagtactttttgtttgtttttttggtatagagagcacatatatatattgtccaggttttactggtcccaatttgggaatgtagcttgtttttcacagaggagaatcagtaagttttccttatatttctgtctaaccaatccatcataaacatcaatatgtcacaatattttggggtacaatttactactaggatctgtgggtagagcaaactaaaaagatgaaatattttccttggtgcagcataaccagaaatctgtgatttatttagattcattttattatgaaaacaagaaaagtcaagaattggatattgtctagtctgttctcaccttacagagtgatgacatcatacacaagagagggtgcacaaagaccagaaagccttctccttacacttgaggcagtgttaggagatagcccgttatatgttgaaggtcagaaatatctcaattgtcattattatttaagatattaaaattaactgttttggggacatgcttacaatactaaaatactctaaaaatgtccacaaccagaagacatagctgattaaaaatagaaaggtatataattagtgaaagataagatactctaggtgacattaaaattatattaatatgaaaacagtgtgctcagttacgtacataccttgagaatttagaagccagatattacaaccctaaattccagttttaggttcatccactttcattattatagccaatagttaaattttcctataaatacatttaaaagtgatttttttaaatatcaggattcaataattttttatctgacatttgcagcatacatttcccaaaattattttatttgtaatacctttctaatatactaatttattttgcttcctgttcaatcttgctccagcaaattttgtatcatttcatttctcccaatgccatcaaaagagtgtgaagcaataagatacgatgcaaagtatatttctaagggatgatttcttatctccccagtattgtaactagaaggctaaaagctttttcttcctacttttaaaaacaagactgctggagtcagataactttccatagagtctactagtagcagactcttactagtaagctccatgtctgccgttgatcgccttaccctcagtgctttctctcaggtagtagtttatgtattgccctgttttacctacatgacattgacaaaatgaatttgtgattatcaaataaaattctttactcttatttgcacactacttatcattttatttttaagaattaatgtctgtaatataaagatactgaatgtcacagggcaagtttctgatctccttggtgcttagaattcttaactgtgtgacttgcacttgtacccagtaacacttaaggatacttatgctgaagaccacgaaagctggcaagttaaatgtattatctgactgcaaagggtaatttgaatctaataggttggattctgtcttgcatatatataattcgcaagaagcaaatcttgttactggttttaagaaaattctaacttttttaaactagagaaaccagagaactccaaagtttaatagtaacttgagtagattagaaaataatttaaaacttcagcaaaatgatagacattgcagatcaatagccctttttattaatgtaaatggcacattatttttgcctagaaagcatttttacaaatattttgaaatttcacatcattttacttttatttaagaaaaagttcctgtattacccaatattctgaaaaaaacaaacactcacacacacacacacacaggagataggtagatagatatatagataaggaggaaatttattagtggaattggcttgtgtgattacggagggtgagaactcccatgatatgccatctgtctcaagctgaagaacctggaaacctggggtttagcacctaatcccggagtccaaaggcctgagaagcaggagctctaatgtctgagatcactaacaggagaaaaaggtggaggttccagcccgagagacagagaaagaatttgcacctcctctcccttttttcagaagggccctcaaagattggatggtaccagtctacgttggtgagggggaatcttctttactcagtctactggttcaaatgccaatctcttctggaaaacgctacataatgttttaccacctatgtaggtaacacttaactcagacaagttgacacataaaattaactaatgtatttcctaaaatttcatttacctaaactttgatgacttaagagtattaaaattaaaatatccagagacttactcctcaaacatataactatttacacttgcattaaaatttcaggagttgatttatgtggtctacctaacaggataaattaataatgatgccaacagtttttatgtattttggcttttctatgtgctatgttatttatacacaatgaatctgatctgtatttcaacaaagctgtctaaattcaaagtgtatgtacttttgctgctatacattcccatatcatgatgttttctatttaaaaaataacaaaactatgaacttggtaggaaagttttggtaaaatttgtcaagtacttagtttccaatgttgtctaacacaaattctaaaaaatcacttaggccattatgaagaaaattttaatttaaaggtaattaaatataaaagatagcttgaaattgtaatcatgtttaaaacatttaattggttacaatatatttttgaaagtgcttaattttgaagaatatgaagtgtacattttactttttattttcattttttatagcacactgaaaagaaaattttacatacattctagtgtacacattttctttcagatttgatagcttttgatcattgtaatacggacatttctgataatttgtaatatggacaaccgaaccaggaaatccggtgttttacaagttgagaaagtagaagccacctacctattacattttcccttcttttcattttgtagtaaaataaaattttactctgctatttgttttggggataatgtgccaaatggcaccacatgcataagaagtcaatgaaataaaaatatacttagaagcatgcctatgtaaaagctatgtatctatggcaactagccttatgaaatgtctcaagtagtaagacttaaatgtcaaaataacttcttatccaggcgtggtggctcacgcctgtaattccagcactttgggaggctgaggcaggtggatcatttgaggtcagggagttcaagacaagcctggccaacatggtgaaacgctgtctctaataaaaatacaaaaattagctgggtagcagtgtcgtgcacctgtaatcccagctactcaggaggctgaggcaggacaatcacatgaggctgggagttggaggttgtggtgagccgagattgcaccactgcacaccagtctgggcaacagagtgagaacctgtctcaaaaaacaaaagaaaaaacaaaaaactacttcttgatccatgggctgcagaatagatgtgagagcaggcatgaaaacaatatgaatctccttgtatatctctgtcagagctcttggggactaggtgtattgtcaatcagcagcaatattttgaaaataatctttttttctgagcagtagttctcaacagtggtcttaaactattcggtcaaccatgcactaaacagatgtgctgttatccaggctttgtttcatttacaaagcacaggcagcgcagatttagcatcaatcttcagagcaccagaatttttgaaatggtaaatgagcgttgacttagttttcagctaaattagtcccttccaagaaagtaaactcatcatttgaagctttgaagccaggcatggacttctctcctcttgctatgaaagtccaaaatgacatcttccaatagaaggctgttttgtttacagtaaaagcctgttatttagtgtagccaccttcataattatttcctttagatcttctggataacttactgcagcttgtctatcagcacttactgctttacctttcacttttatgttttagagacagcttctttccttaaacttcatgaataaacctctgctagcttcaaactcttctgcagcttcttcatctcacctaggcttttagaattaaagagtgttagggccttgctctggattaggctttggcttaagtaagtgttgtggttggtttgatttatccagataccaaagcaggctgtgtgctttcttatcattcatgtgttcactgaagtagcaattttaatttatttcaataacttttcccttgcattcacaactcagctaattgtttggcacaagaggcctcactttcagcctatcttggtgttcaacatgacttcctcagtaagcttgttcatttctagcttttgatttaaagtgagagatgtgtgactctttctttcacttaaacacttagacatcattgcagggttactaattggcctaatttcaatattgtgtttcaaggaatagggaagcctgagggctaggagaaagaaagggggaatggttattcagtggagcagtcagcatatatacatttatcaattaagttcactggcttatatgggcatggtttgtggtgccctaaaaaggttacataaaatcaatgatcacagattacagatcgccataacatatagtaataataataataataataatacaagtttgaaatactgcgagtttttccaccatgtaacacagagtcatgaagttagtacatgcagttggcatgatggcatccatagacttccttgacaggattcctgcaaactttcaattagtaaaaactgcaatatctgtaaagcgaaattgcctgtattaaagaaactgccttcatcagaacttagaaaaatgaaatatagacctacaccttgttttacttatttctgtttaatatttaattccaatactgtaaccataaagcaatattattgctaacgtgcttctaactgtaattgcattttagtgaaagatgaatgtttttgtggttgtttttgtaattactatcattctttggtagtttctatttgtttttgctctttagttacattttcaagtttttttaatttttttttttaattagtgaggtaagcttagtacaatttaaacctctcatacagactttaataattaaaaaaaacaaaattatgaccaagcacggtggctcattcctgtaatcccagcaatttgagaggccagtgtgggaagattgcttgagtccatgcatttgagaccagcctggtcactacagtgcaaccctgtctctataaaaaattaaaatattaggcgggcatggtggtgcatggctgtagtcccagctatagtcccagctattcaggaggctgaggcaggatgattgcttaagccaaggacttcaagggtgtagtaatctatcatcacaccactgcactccaggctggcaagagagcaggactctgtcttggaaaacaaaaacaaaacaccaaaatcatctttctatttacatagaaatgcccttcataatttattgtcttttatcatttgccaaggaatagggtcataaggaggtcctactgtttctaaaaagcctactttgttatttagagacctttaactcctaggaagttgttttatggtataataacattgcttcctcacattcacagaaacctctgcttctattatattcccagaagaaagttctgccaaatgaaatttcctcacgtgagtacgtgtttcctacgaagtttcacccactaacagaataaatgcttttccattttataatatctacgttccatccatgacttcatttcatcatgaataattattttgtttcagatattgcctttgtttcaactggcttgaaaccttgacattatgctgacttatgattcactatcaatttaattcctccaggatcccaatcagtggtcttgtcagcctagattctttcttgtttctagtcttctggtaatctacatacaccacaaactaccttatatatataaagtatatatttgattcaaagtctgaaactatacaggaagcagaatatctaatgcaaattaaaatattgcaaagcatagaaaagaatgaatacttaactgattatgttataaatcatgtatgacttatttcccaaaattactttggagcacaaaaactttgcaaaccaatcattaataaatattaacacataattttaaatatattacaaacctgaagctagcagagttttacagtattttctatgacatattattaattataattggaatacatgaatttataaaaagtaacctactaatacagtcacccagaataataagctaaatgaagatcatattgtgaatatcttaaatttataaaatgtaactaaatatgtttatgatagaaaaattttatataaaattacaaacacattctgtaaaatatctattttatataatactaagatagttcacaatgaaatgtcaagataaaagtcaatccataagcaagtctcctatcactgaatagtattcttgaaatttaagccagtggaaatagacaagcaattacacatatttgaatgaacatttcaagattctgtttgtgtaaatcctaactacttacaaaatacaaaggatgcaaatgtaagcaattaattctagaaactgtgttcagtgaggttatcagacctaagttacacacatagtatgttttagacatttacagaaaagcctgtcctgtaattacttactgtaaaatatgtagtagccatttgaagaatacaacaaaaatagaaaaaataggaagatataatattactaagtgcatgatatttcccaaacctatctacataatttagaaaatttcaaccaaaatatagacatgatttgatttgtagtaacctaatagaattatcagaattaacaataatctgaaatagcaccaatagctaaaaacaattcaaaaataaaaacattgagagagatcaagcgtgatcaaacataaaatgcactataaatctataaaaaatttacatagtgcggtttagaaatatgtagtcaatgaaagtatcaaaatcgagttcagaattacaactatgcctgccacaataaataattggcagtcattttgttactcaattcattgctaacaactataaatccacaaatatttccaggtgatatctagatgaccactgaaatgtccactgaccctcgggggtgtccaataccaataattatttatacaagaaatttcctttaaaaaatgattcaagccaagttacacatatcattttggaagcaacagataaaagtagaatctcatcagaaaagtgtttactagtcagacagaacaaaaagttttcatcaacaccagtctatgccagtcagttattttcaccaagttgtattaacaggaaaaggaatgatcagaaaacttgcaaaagttacagaggattttaggacctctcattagactgtaaagtataattttcatttttcaatattatatagtgatttgtattctgacaatttatagttgctgtaacagaaattactctacttcacagggagaagcatacaaaaatgaatggctgtgctgccaggggagtggtatttggaagataagataggcattaactagacactaataccactaattaaagcaagagctggaatgtgctggtgctgctgcttatgaaaaataaccctgcacctgtgtcagacactgttgggctgaatactgttattttaccatagctcctcttccacttgcctttgtgttaattttaataatcatagatttttaagttcataaaaggaatgatgtttattgtttgtttttctcagatacaaattccactcagtggtgtcttcacacttagatctgcattccctgtttaaagttaaaattgagagtactttctttgtggagaattctcatatgtaaaattagaatataaaattagtagtggtaagatgaaggaaatagtagcggtaagatgaaggaaatagcggtaagatgaaggaaattattaagtgaaaagttgagaatgttttggtgcaataagccgaaaatagtcaacaagaacaatatttcaaatttataaagagagaaaaagcatgtcatgaccatgtttgctgttataaaattgcattgacatgtttgcaaatatttgcaaaaatatcctaaaataaagaataattaaaatcatcctttagttgattgttctcatttttgttgtctgcattctactgtcttgccaaaacaacagttttaagtcaaaatattttattgcttaagatattctcctaaaaaatcagtttattttgtttgtatagatcagcaattttttgcatttctattatttaaagtaaggttttctaattattagatttcttttttttcttttagaatataagctattttgtttcaggtgtttaagaaaattagaaatacattttatatagaatttttctgtatggaatattactctccagaaagtaaaaatcttatgtagtgatctagtttgtcctcacccaaatcttaaaaaaaattagatgacctgttttatattctcaccgtattctctctccagtcctctcttattcttatggtattaatattccaggtatacctctctattttgttctgtgaatgttggtcttcatcttggattttttgtatgatgatgatattagttctcttatgtttctgctgctttttttttccttttcagtgtcatagctgtttgctttaacacttttgagtgtgttaatatggttccttaactactatatagttctttgtctctaaatttgttgtaaatctgaagtcaatccattacactgtatgcagtaattgtgtaaatattattcattgtaggatcagattattgacctttttgttaaatagcatgaatactgggactctgggagaatgttcacaacctaaatgttgtcttgaacttttatttctttttttagcatgttatttactgaaaaacataccccatttggtatttcattacaagttatatgtatcatttggattttctttgtgtttatcatttgagactccagaatcatgtaattagtgggagtcaaattatttgatataatactcactggaccctttccttgtaaagttatttgtaaaatatgtttggaaattttatttggttgatggtctctgttcattttatttatttattttgagacagagttgtgctctgtcacccaggctggagtgcagtggtgtgatcaccactcactgcagcctcgttccctgggctcaagcgatccttccgcctcaccctcctgagtatctgtgactacatgcatgcatcaccaaacccagatatatttttgattttttgtagcaacaaggtctcactctgttgcccaggctggtctcaaacttctgagctcaagcaatcctcctgactctgcctcccaaaattctgccattacaggaatgaaccactgtgctcagcctcttctaattttagaaaaaacgtcatttaacatagttttgaatccttttgaatctttggttttcttttcagtgataatttttgtttccattaacttgttaccattgtctatttttctgaagtatcctgtttataaccatctttgtctatattactctatttcttatattactgtatttctataaagagattattttaaagtgtttccatctattatttaaaatatatttatcccgaggctgtaataaagtttctttctttcttttctctcttctctttctttttttttaatggctgcttatctggctagctaccttcactttgtatgttgctggttgtctgcctgattatccattccaatttaaaagtagaacactggactgtttattttaaatcattgagatatgtttatcctccattagcccatgtatgtctgtttccttatggatctttttaaaacaacaacaaccaactaaatgggccatttcctcaaatggtgctgcaatttaactggagagcttcgtcttaagagtggtcactagagaactgatgtcacctacccacgtccatacacatggtatttcacggatgaaagttttccctggatgaccggcaggcactgtaaaaatgtttgctgtcccctgaacttcgtacaatttctttagagaatgatcgtatttttaaaaatttccctggagttaaattcctcccttggtgttacatctttacatttaaatcctgtacaactaccctatctgccaaatctctgcacgatatctctctggcatttcactgggaaactaacatcatattatcttttagtgttatctaatctgcagctgaaactatattgcttatatttaaataatatttatcaataatccatattcctgaacactgttaaactcatttattcaatgttgaagattattctctcccccactgttagaagttttgctctcacgtaatttttgctttaatagttctgcgttgtcatttcagtagttggggtaaatggacattcatttgattttttttttttttttttttttttgacacgcagtcttgctccgtggcccaggttagagtagagtacagcggcacgatctcggcttactgcaacctccgcctcccgggttcaagtgattctcctgcctcagcctcctgagtagctgggattaaaaccgcccaccactgagcctggctgatttgtctatttttagtggagacggggtttcatcatcttggccaggctggtctcgattgatctttttatttaatatttgagttgtcttacatgtcactgtgtcaaatatatgttaattttcctgtaaacagtatgatctatttctataactgtggaagtcaaactctattaatatatcaatattctactaaacaatgtgtgcttgttaggaaactgtaatatatggcactatgttggttttttgtgaagattaaataagttaatgttttctcaataaacattagttctaaacattagtaactaatgctgttttattaatatttgatcagaattcaatacccgattatatctaattatctttgtattctgactttttggggttaaagaatattcacatttctggaaatctaatccaagaacatatactcaagtctttgataatacatggtgatatctcttatataaatgaagacatgtcctcctaaaacaatctatttaagctagtgtttgtgtatgttatgacctaaaagtgcagtctttctgcaaagtcactgacagtttatgtgtaataacttacacactatacctacttatacttagcctaataaatgtttttattattctttgtttttataatacatttatttaatatttaaaatggttgttttcactgttaaatacatatttatatgtatttttgttcttttcttttgatccaatttgtcgatttattgtgacttctggttaagtgattcctaggttttatttgtaatgtatgatcacacttttgaaatatagcatagtaaaacttttaacttttaatacttttttcagacttttatatttttctatcttatgccaatattatcactgaaaaagagctactttcctcactatttaccattgcaaaggatgatgactatgtttgaattgaatccagtaattctaatatatactaaacacatagaaaagtaattttattttgagcatttttaaaaacacaattcacttttacttatttctctttctcattcagtaattgatttattatataatttttggaaatatgttagttcttttaaaatataatttatcaccaacttcatatgttggaccaaagtgcgtataaagtcaatagctagttatgtaaatgaaaccttccaatgaattaaataaacaatattctacatcttatatattcttaagcttattgttacatttatattcagtgtaatttcagagtgatgtatagggaaatcagaaggtcagtatttttctttataaaacacggtgccaggaatttttatttttctaggttaggtaaccttggatacaacatattattatctttcagcaagacatgcacattttcacagtgcaaagttctatttttaaaagtgtacgtatttcgttgcaaacatttcattacaatttactttttataacaacaatgtcaactttgacacttttgaaataactatcttaaatacagatctgaacttttacttcagtcaatgctatagttatcaccagatttcatatagtaaacagtaactgaagcctggtgctattcaaatttctccttaaattaaaaaataccaaaaacctttttctttgtcagtcaatttttttcagctttcttggcttctttatctgttgtatcaagttgcagaatatatagtttatgaaggaaatgaaaaaaatcaactatttctgctgatgttatcactcacacacttgaactgacatatactgaaagaatgacaagctgaagaatataatcagtgtggcaacatcacttttattggctcataacatctatcttcaaactgtaacaaacagtttggttacccagctttctagttggcacctctgaaaggtcataaggacatgtttacctagtgttacaaaaacacatttcacacccctggtatcgttctgctggtaaaaagaatttgacatttgtatttcctgttacttaagggcttcaacattttctacgatatgaaatcttggaggcatcttagaggatacctaaataatgtacaatatttacacatttatttttacttcatccttggcattttagaatcaaaatagttgtgcaaggttatctcttctctctctctccctttctttttttttcctatgaaacggagtcttgctatgtcacccaggctggagtgcagtggtgcaatcttggctcactgccacctctaactccccagtacaagtgattctcctgcctcagcctcccgagtagctgggattacaggcacgcaccaccatggctggctaatttttgtatttttagtagagacggggtttcgccatgttggccaggctggtctcgaactcctgacctcaagtgatctacccacctctgcctcccaaagttctgggattacaggcgtgagccaccatgcccggccttcttttttctttctttttaaaactatgctagccacttaatgatcactctgtgtctgaagattcagaatacatctcagctcttagaatgtcggtatagtatatatatatatgtgtatatgtctatatatatatatatatataatgcatatatatctattataacccctcctctctaaattttttctctctttgggaattctatttatatatcttatcctttggagtgctttcctatgtttcttttccatcatattgtctgttgtttttgtcccccttctgcatccagaaacatttcaggatttttatatactgattgctctaaagaatttctatttttatcagtcatctatctaagagtcttttttttttaaatttaattccttggaatgtcatcttttttatttgaaagtaacttctccatattctttaataatctttttttccttgacaatgtttattattttttgtttgttttctttatatatatatacatatatatatttttttattgtactttaagttctagggtacatgttcacaatatgcaggtttgttacatatgtatacatgtgccatgttggtgtgctgcacccattaactcgtcatttacattaggtatatctcttaacgctgtccctccccctaccccacaacaggccccggtgtgtgatgttccccttcctgtgtccatgtgttctcattgttcaattcccacctatgagtgagaacacgtggtgtttggttttttgtccttgtgatagtttgctgagaatgatggtttccagcttcatccatgtccctacaaaggacatgaactcatcattttttatggctgcataggattccatggtgtatacgtgccacattttcttaatccagtctattattgatggacatttgggttggttccaagtctttgctattgtgagtagtgccacaataaacatatgtgtgcatgtgtctttatagcagcatgatttatattcctttgggtatatacccagtaatgggatgcctgggtcaaatggtgtttctagttctagatccctgaggaatcaccacactgtcttccacaatggttgaactagtttacagtcccaccaacagtgtaaaagtgttcctatttctccacatcctctctggcacctgttgtttcctgactttttaatgatcgccgttctaactggtgtgagatggtatctcattgtggttttgatttgcatttctctgatggccagtgatgatgagcattttttcatgtgtcctttggctgcataaatgtctcttttcagaagtgtctgttcatatcgtttgcccactttttgatggggttgtttttttcttgtaaatttgtttgagttctttgtagattctgatattagccctttgtcagatgagtagattgcaaaaattttctcccattctgtaggttgcctgttcactctgatggtagtttcttttgctgtgcagaagctctttagtttaattagatcccacttgtcaattttggcttttgttgccattgcttttggtgttttagacatgaagcccttactcacgcctatgccctgaatggtattgcctaggatttcttctagggtttttatggttttaggcctaacatttaagtttttaatccatcttgaaataatttttgtataaggtgtaaggaagggatccagtttcagctttctacatatagctagccagttttcccagcaacatttgttaaatagggaatcctttccccattgcttgtttttgtcaggtttgtaaaagatcagatatttgcagatgcatggtattatttctgagggctctgttctgttccattggtctatatctctgttttggtaccagtaccatgctgtcttggttactgtagccttgtagtatagttggaagtcaggtagcgtgatgcctccagctttgttcttttggcttaggattgacttggtgatgcgggctcttttttggttccatatgaactttaaagtagttttttccaattctgtgaagaaagtcattggtagcttgatggggatggcattgaatctataaattaccttgggcagtatggccattttcacgatactgattcttcctatccatgagcatggaatgttcttccatttgtttgtatcctcttttatttcactgagcagtggtttgtagtcctccttgaaggtctttcacatcccttgtaagttggattcctaggtattttattctctttgaagcagttgtgaaggggagttcactcatgatttggttctctgtctgttattggtgtataagaatgcttgtgatttttgtacattgattttgtatcctgagactttgctgaagttgcttatcagcttaacgagattttgggctgagacaatggggttttctagatatacaatcatgtcatctgtaaacagggacaatttgacttcctcttttcctaattgaataccctttatttccttctcctgcctgattgacctggccagaacttccaacactatgttgaataggagtggtgagagagggcatccctgtcttgtgccagttttcaaagggaatgcttccagtttttgcccattcagtatgatattgactatgggtttgtcataaatagctcttattatttttagatacgtcccatcaataccaaatttattgagagtttttagcacgaagggccattggattttgtcaaaggccttttctgcatctattgagataatcatgtggtttttgtctttggttctgtttatacactggattacatttagtgatttgcatatgttgaactagccttgcatcccagggatgaagcgcacttgatcatggtggataagctttttgatgtgctgctggattcagtttgccagtattttattgaggattttttcatcgatattcagggatattggtctaaaattctcttttattgttgtgtttctgccaggctttggtatcaggatgatgctggcctcataaaataagttgtgatgttgatttatttttgctgtcctggattgtgtccatatgtcctctttgctgatgtatttattaaaccagatgtatgaaggctcccccttgttgctgtcataagtttctgcttccattttcatttgtgtcctctcactcctcttcttcacctcctttccagaattttacgtcacctctttttttttgtctcaccctctcctgaattctgtattttatttttctttgatctattttttttcacttctacacagtgttagtttctcaacaaggataagtgaatcacatgtgagtctagaatgccatcttaatctaaatgcctactttttacatagaaaacacatacaggtaatacaatcttcatctagctgttcaattgaaggtaacctaacttatgagaaatgaatattcaattacattaatattaattttgtatggtttatatcagcatatctgtatggttatttcatttatacagtaaaaaaaattacatctgttaaaggatcataaggatggtagactataagcttgtgaaccctggaagtttgagacaggtctcagttcatttggaaagtttattttgccaactttgaggacacacccatgacacagactcaggaagtcttgacaacatgtgcccaaggtggtcagggcacagcttgcttttatacatttagggagacatgagacatcaatcaaaatatgcaagatgtatactagttcggtctggaaaggcgcgacaacttgaagtaaagccaggaggactagaagcagggatggagcttccaggcaacagatagatgatacgcaaaaggttacattcttttgggtttctgattagcctttctaagggaggcaaatcagatacgcatctatctcagtgagcagaggagtgactttgaatagaatgggaggcaggttcacatgaagcagttcctgccttgagttttccttagtgattttgagggcccaagatattttcctttcacaagctgtaaatataagatcaagtttaaaagtaattagtaaaatcatatagatgattaataaataataagtacatttattatttaatatcaggtatcagttatgcaccattaaagggcggtatagctcatgggtagagcatgtgactgcagttatgcaccattaaacaatatgccatctgttattcattgaattataccgcctcccacaccaattaatacattgaagtcctaaccctcactacctcaagtgtggctttgtttggaaatacagtcatggcagatataattagttaagatgacgccattagggtgtgccctccttagaatgtcagcggtccttataaaaggggaaaaatgtggctacaggcatacacacatggagtgagagcatcatataaagataggagttatgccgtcacaagtcaaggaattaccaggagctatgagggagtcttggaacaggatgttcagaggaagcacagacctggcaacataatgatttaagactttcgacctccaggagtgtaagaaaataaactcccgatgctctcagatacccagtttgtggcaccttcttacagcagaccaacacaatgatataccttccttgtccccacgaaatattgtttttgtgtctgagatttcttattttctttttttccccaattctattaagatgaatatttttaaaagattacataatgcaaaactgtgcatgttctgacatctgtcttccactgcagctttatctcataatcttatgtgtctacctccttgctttcttctccagccataatctctttcctatcaccatcatcattataagagttaaagaaagaagagagaaacacgaaaagtgactcaacagtcaaaaacaggtttactttggagaataaacctgagaggggcttctggctgattttggtcaggagtgctgtgtcttacagactaagggtatttaagggttttagggcaagagagcttatcaaagacttggaatgtttctgtgtggagaaaagtttattgaggagttgaaatgtttccgctcaaagggaaggttatcttgggactgacatctctcctgctggaggggaggttatttcagggctggcatgtctctggtcagggaggggtttattttagggttggaatgtttctggttggagttgtcatttgtggtttatggtcatgctgaccttagctattaagctgatgccctttggatttaggcggttgttgatcaaggggaactttaaaaaggcggtgcttgtccaagatggcgatgctcctgctctgtcaatcatcatcatcatcaccatttgttccttgaatgaataattctttcttatgtcatattgcctttgcaatttgtgtgtgtgtgtgtgtgtgtgtgtgtgtgtgtgtgtgtgtttctgcatagaatattcttctccttttgctcattttacatagttaactgctatttatttattttttatcaccttaattcttggtcaacatctataaactttgtgagaaaagggattgggtttgttttcactcatcattgcattcccactatcacatgaattttctggtacataaatgaatcgagcataaatatttccaacattaatgaatgaagctgagattgtaagagtagatccaataaaattacatcatttcggctacttgggctttgaattctctgtttatatgtgaaaacaaatatgctctagctacaaagaaataacatttggcaaactcctactatacatttcatgccctcttactatttcaataatgctctctttaaatcctaagaacaggctggtgaggtgtatgtaacatctccccttttcccctagttattttctggtgaagaaattgagcaacattaaagttaattaactgccataattgcactgctggctattatatttcaataacttgccatggggtatgatttaggtaaatgtgaaaggtattatagtcacggtggtcaggaaaaagtttcagaaatgtcagtgtttgaacaatgtttgagaaaaggaataattttttcagaaagtaactcaagagaggagagagacattcctgaaagcacgtatagagtgactattcaagcttcactcttccttttgaatcattcacaccagtgagtttccaagagaatttttctcctttcagtgattgtcagacatggatccattgtcagacttcatgtccattaaatcaacaaatgagatgtactttaatcaattgcctacatcattgaattaagcagagcatctcctgtgaggacctgccagcctgttagattcatctctaactaaaattttacttactttgtcctgctaaatcaatcactcagaaaatatatgtgcattttattttatgtttctttttcttctagccaattttctggatggagatttctggtttttatgttttgctgtagtttatgctttttggggtcataataacaccagtggacatatgtctggggtcatgtaacatcaagacagaatgaaaatgaaaagcactttagaggagatgggtagaaactgtcagaaacgtctaacttatttgattcctccaaatatttattctttgatatccagactcctcttatttgtaaacagagaagccgaaagcagtagaaaattcataaagtgctgcccttaagcaacatctgggaacactatttggactacattttcaggagtctcagaattttggctacaccaggaaacattttctattgtagtggtgacatcattattaacaacaacaatgagagttaacatttattgtgtgcatactacatcttaggtcatgttttaaaagtttatatatataaaaactgttttaattcaaatagtatttcctaatctattatggatagagcatacagaattgaactgatctgatttctgctgtaaattactcagtgatatttaaaactctcattcttaattttccctccatacaaatactttagatcaccagcaaaaatgccctctatgtattcaccttcaccatctagatcctaactagttgccagcaaaaactttattaagtacatcagcaacacaaactgatttgctactgggcaatcttagagtctgctgctcacctgctatgtctcaaccagctcattaagtcctctaatgtttgtagccttgattctggatcttctttcttgatctccttttcttctgacttcacagaacagaaaatgactcaaattactgtatggacaataaataattattttttaatatcagtttggacaataattgaaatcagaaactaacaggaattaggttattgaaacagatttggtgttcatttttattcactggaaatctgcttcattttgcaggtttcctcaggttgtacttgttaacccatttcatactttttgctaaatatcccagagatggtaagtgcttagtcctgaaccttttataaggtattaggatctgggcaattttccttagagagacagctgagaatagttacatactgtgaagtacacattcataaaattaataagatttgcatgatttaattactgtagttgctcttttatataaaataaaattcaagtttataatttcattttcacactgaaattaacaataattattcactattccccagactacatgctaaaagtagaaaaattggtccagtgagccctcttaccactgtcatggctgtcccaggttgcaacaaagacagtgtcagaaaagactgtaaaaaatgtggctacccttgtcaccttacttttgaatgccgcaattttctctgagtagaccctaaaagggacatagttttggatgtcagcagtacaagtagtgaagatagagatgaagagaatgaagaactgaataaattgcaggcattacaggaaaaaagaataaatgaagaagaggaaaagaaaaaagaaaaaatcaaattgaaaaaaaagaaaaaggtcttatccagttccactgaagaggacacttcaaaacaaaagaaacgaagatatcagaagaaagaaaagaaaaaaagagtaaatcaataaagggaaacatcacaaaaaggaaagaacaaggagagaaaaaaaaaagcattcttctacccctaaaagttctgaattctccagaaagtaactgagactttggcttaagccattaaatttaaaaatttgtttttaaaacatgtttgccttgccttggaatttgctatatattatgttttgcaataaatcacagccttttccatacagacattttttgtatgtgggaccattatccctctggtaatatatttttaatatgctatgactgtaaagtattaaatcagtcttgttacttgatagtgatgccccaagtatagctatttgtatgtactaaacacatcatttttggtatatgtgtctctgtgtttttggctagtgttattacttcataagttgattgtaaaatggctttactatagttaacacgagtcatctacctagtagttaatgagtattgctgaatcggatgcccaccttgaagtgatgaagctaggtaagggtaatgttttgctcttgacacagatatataaatttgacacagatatataaaaagctataatataaatttaatagctttatatacttaaatataatatcttttaaagctagtaaaaaaatagaaacattgttcaaatttaaatgaatactacacagagtactatcaactgagagtagatattgtacaaagtcatacaatgattaaaacatggatattatctgcataaagatatttggagcctagagacatatacaatgctatatgacattattattaattcattatggatcactttatggctgtttctttcttactgctgtgatctatgaaagaataatgaaacagagcaccggagattaagtgatggtaaaagatatgtaagtcacgcaggtgggtggaagagagaaagaaagagagaagaaaagagagacttttgtttttaatattcacaaatcattggagttagaagtaaagaaataaaaacaaattaaagcttaatatcacaggattaaaaatgcaactcccattgactaaagaagcaatatatgcaaagataaacgtaaatacacctaatttattttggatttcgggagaccagcaggctggtaaatataatgggagacaaagattgtatacccagccaagttatctttctagtagcaagattatagaagcatgtaaaagaccacagacaacaacaacaagaagaaattttaaaatgcagaactcagagaattcattgattttctgagattccacaattctctcttgtggactctataacaaagatgaccttcatctaaagaagatataatttcccattttgtagattgcctgttcactctgatggtagtttcttttgctgtgcagaagctttagtttaattagatcccatttgtcaattttggcttttgttgccattgcttttggtgttttagacatgaagtccttgccgatgcctatgtcctgaatagtaatgcctaggttttcttctagggtttttatggttttaggtctaacgtttaagtctttaatccatcttgaattaatttttgtataaggtgtaaggaagggatccagtttcagctttctacatatggctagccagttttccgagcaccatttatcaaacagggaatcctttccccattgcttgtttttctcaggtttcttaaagatcaggtagttgtagatatgcggcattatttctgagcgctctgttctgttccattgatctatatctctgttttggtaccagtaccatgctattttggttactgtagccttgtagtatagtttgaagtcaggtagcgtgatgcctccagctttgttcttttggcttaggattgacttggcgatgcgggctctttttttggttccatatgaactttaaagtagttttttccaattctgtgaagaaagtcattggtagcttgatggggatggcattgaatctttaaattaccttgggcagtatggccattttcacgatattgattcttcctacccatgagcatggaatgttcttccattcgtttgtatcctcttttatttcattgagcagtggattgtagttctccttgaagaggtccttcacatcccttgtaagttggattcctaggtattttattctctttgaagcaattgtgaatgggagttcactcatgatttagctctctgtttgtctgttattggtgtataagaatgcttgtgatttttgtacattgattttgggcgaaggacatgaacagacacttctcaaaagaagacatttatgcagccaaaaaacacatgaaataatgctcactgtcactggccatcagagaaatgcaaatcaaaaccacaatgagataccatcttatatcagttagaatggcaatcattaaaaagtcaggaaacaacaggtgctggagaggatgtggagaaataggaacacttttacactgttggtgggactgtaaactagtacaaccattgtggaagtcagtgtggtgattcctcagggatctagaactagaaataccatttgacccagccatcccattactgggtatatacccaaaggactataaatcatactgctataaagacacatgcacacgtatgtttattgtggcactattcacaatagcaaagacttggaaccaacccaaatgtccaacaaggatagactggattaagaaaatgtggcacatatacaccatggaatcctatgcagccataaaaaatgatgagttcatgtcccttgtagggacatggatgaaattggaaatcatcattctcagtaaactattgcaagaacaaaaaaccaaacaccgcatattctcactcataggcaggaattgaacaatgagaacacatggacacaggaaggggaacatcacactctggggactgctgtggggtggggggagggggagggatagctttaggagatatacctaatgctaaatgacgagttaaagagtgcagcacaccagcatggcacatgtatacatacgtaactaacctgcacattgtgcacatgtaccctaaaacttaaagtataagaataataaaataaaaaataaaaaaataagatataatttaagaaacactggcaaaaggattaatagttggcatttaaaaaaatagtcccaaatttttttaaaaagtggatacatggatagaagaaaatatacaaatattatgttttgacaaagaagaatcaatataataaaaaagaagataagagaaacaaaaaagcagattaatctcattttctgatatatagaaaataaatggcaaatagtgcaattaaatattgataatcaggtattaaaagactaattgagaaaatagggacttaagggcaattttaaaagccgtaagaacagaggttacaactggaatgaaaatagaaactttcttaaatgttgatgtaactttaaaattacagaagaaagcacatgacatagagaaataaagattaaatcatgtataataagcatagtaagtataatgtaaactaatgtaaaatttaagacacaatatatcagcttatctacatatgttaatgaatctaactcatttattgaaagaaaaagaaatctaatcataagatagatcaattgatcatttaatagatcaattcaaaaggaaatgaactattcaaatactagaagaaaacaaaggtaaattcctctctaacttatggtttggaaaatatttttacatatgactcaaattctgcattcaagaaaatgtagatatctctgactttaaaagattttaaaaaactttgttttccaaactaccataaaaaaccaacaagtgacaaaagcaaataacaaaaacttagaagaaacttgtaataacagagataaaggattaatgtatattttaagaatatgaaacactcttaaaattgaaggaatcaagaccaaaaccatacaggaaaataaacaaaacatgaatagggatgtcccaaaattatataatgacctttaaaacatgatatatttacattcacttataatagatgcatgcatctcaaaaccatgctgagttaccacttcttgtctgtcagattatcaaaaattaaaatcttggtaacttattccattggtgaggctattacaaaacagtctcacagattcatactttataaaagaaaatttggctatattgaacaaacctatatgtttatactgttacttagaaatttcactgaatataagcttctgtaaatataaaaatagttcttatagcaccaggtataattacagaatactgaaaacaaattagttgcctgtatacagggcattgcttaaatacactctgataaatactcagatggcggtaatagcagctgcaaaagaaatgtggaaaatttctattaactgatattgactaacttataggctgtattaattacatttaaaaagaagccttcaaaatattgtatttttttctataagaaaaagaggatgataattaagtattcatgcatctgcttagttttacaaagatcaacccagtagagataagctagacaaaattctaattgattatttacaagcgtgagtaggaacagattggaaatgttggtggtgatggtttgagacttctctatgtctaccttttttgtagcttttactttttgaaaccacattgcaaaataaaaccaatgagctagaaaaaaaattagaaatacaaacagcaactaaggaaactctgtatttcaaatgactaatatgaccaaggtaaaaaaacaggaaataactaaccaatgcaacttaaaaacggagtattgtattgatacatcatcagtttacaaagaaaaataaccctagacaaatactgtactatagttactaggtttgggtttttttggctatgatattgctagaaattctaaaactaccctaattttagctttaagcaaacaaattattatactgaggataaatggagccagatttctcactgatgaagaaatgaattacgaatacgtaaatggaaggagagtagaccctgtggtgtttaaccaggcatgtaggtatcattgtgaacacatggtcaaagtctttgtggagaggtagctgattttaggactgggcaagtaaagtacaagatgaaattagaacatcttcttttagaaagcaagttgcattaaaaataaatagggcattaaaaaatacacactgaattcagtttgaaggggtttttattggataaatctggggcaatttgacaatcaaaattaataataataaagtatcaacaaattaaaaaccaataaatcaaatgagaaatcatgtatttatacatatgtaaataaatacacaattgtataaagagggtaaaaggaaaaatattcatttagggtggaattatacctaataaatgtacaggaatgatagaattatggagatttttcaaactgtcatttagcagtcatcatattaataattatttcaagtaagattcagcaactgatgccaaaatagatggtaaaagtttgctgagaagtagggcgtgaaaattttatatatatgtaaaaacatatatatcagactacctatgcatacataaacataaacacacacatttatatgagagagagaacaaatataataatatttaaaatagagaaatatggttggagggtatatggaaattcttaacactattcttgcaaatttgctataagctttaaagtatgtggaaataaaaaattataaaaatgagaaattgctttacccacgtgaccccaattttagttgctacaaaatgggatataaagtataatttcaattataaaaatgacgtatgtaaaaaccatagtatagttacagaccactatagattctagacaaataacagttttatcttctttttcaaaagtggcaaaattgttacattttaattttgccaactcataaacaatatctgaacattttgtttctgcattgcatattattacaacactaactcacaaacttctaacataataattattttcttcttaaaagtagggaatctctgctttaaaatatctgaaacacttttctaagatgatagaagttgtgtagtttaaaaataagaccttgattttggaagcagacataggttccgattcgagctcatacgttttcaactgcttgctttgacatagttacttaggctctccacagttcagtttcattgccagtatcataagaataacttaattcttatttaatgggtttcttgaagcccaaaggagaaattcaagaaaatacctagcacaatgcctgtgccataaataaatgttaatacatattagctatcacaatggataagggttacacataattaattgagatttttaggtattgtttcttcttaaaccactacctgtggaacccttccatagatataaaatcttaaccaattcatgatctaaaattaagttgatgatttgtgctactcgcacattgaatagaatgagcatagatttttttcaatatctttcttttacaagcaaaagaaaaataaaagcaaaactctaaagtgagttcctcaaagtgacacttcaaatgattttctttgttctcagtttctactctcattagaaatgttctgaaaatatttcactctctcatcaactacctgagggttttataagaacgttttttaaatattatttgcaggacagagatatactgttcaattgagaatgaaaaatgtctcatacatttatttaacttgccaatctgtaatttactcactgtccatttaaaaacatttttattgttatttattaagccttactctggaagcccaaatcctttatttcattattgcaataataaagccagcaatgcaagaagagcggagaaaattggttttcctatcggtgtttgaggtctacatgattagactgcttctctgtctgcggatactctgcacactttgaatactgacttcaagggttttagaacatcgatgggcttttagtcaaaaaaaaagtctaaaatacaaatattatttttaaaatttagctgattatcttaagcaaaaattaagtttttttctttttttaaattttttgtctgatattttgaacccataaagaaattaaaattacatagaatgtttttatgtcctaaaacaaggagataatagccatagaggttttattaggcaattagtagctataaaactgaaggaatggtaggatgattaatttttttgatttacttatttaaaatccaaccataggaagaagaaaatgatacttcaaatgctttaaaaaatgaaggtatcgtttaacatattaacattattttaataataatatatttacattataattatttcttaacactgaaatatatgaaaatctctaaatcctttatctggagtttaaaaagttaaaatctaagctaattaaaaaatgaaatgcatatgtctttgaaagacaaaagcaataatctaatagactcccattttcaaaggaacaataattttctcttaggtatacctctgatcatagatttagcaatatcaaggtaatttgtagcacaaaataatacaccactggatgttaaagacttagatcaacaaaattcactaatcatcgttccaattctttaattttatagctcctaattgcataataaaatctccatgactattatctcttccttttatgacatatatacattttgtgtaattttaatttaagaattcaaaatatcagacaagaaattcagtatatagcctacaaaatactgtagtataaaatagggcaaagtaccaccgggccatttaagaaaccgtctgatttgtgtgacttagtacttctttgcctatgaagcatagtctgagtctgaacaactggtgacagttaaaagtctgcagcgttccacttttttgatttttatggatctgtacagtggtccttatcctagaaaattagccattgaattcatttggggcatcatgtgccctgagcaatgtattttcaggcctgtgcatatcaataatttaaagtaaaagggtgaagcgcgatcaacagttaagctcttaaaacgtgccttttaattagaaaagggtgttaaaataaggcaacactttaaagtaaaatgatacccatttgtaacatattggcaattaaactcacttctttttcattattccttagacaccccgtgctgtacttacaaggcaattctaactctttaaagctagttttgaatcacaagcttaagctgacagttaccaggttccgtttctcattcttggtctttaagttcctacatgctgcttttgaaaactgaacagacatttccttctttagatattatgtttcttcaaaacatcatatttatttacaacaatttattgtctatattgtgccagcgaaaatacaataagatgttaagtaaactttatattcagtagcccgatgctgttgataaggtctgaggaattttaatttttaaatcttacatgcagtacacttaaatgaataataccttcttcttgatgcagactatgtaacctaaacattcttgacaaagtgatgagtttgaccattcccttgaggtacatttgcatctatttaagtacaatttaataagtgcctactctttggcaggcattgtgaacggagaaatggcctaatcagatgccacctagggatgtttcggtcaatggtggactgtgtgcatgacggtggtcccacaagtttataataccatgtttatactgtgtttttcctatgtttaaccatctttagatatacaaaattggcattgataaaataccgttaactacaacacaaatcttgtgctcagttttgcaagttttagataacttatttaacttatttttcacaaacatgcataggcaatacagtgaaaaaaaatgtagtgtttttaataaatctttcaagaacacttggacatctatatgccaaaaacataaaaatggatttacactatatacagtcatgtgcttcctaaggacattttggtcaacaatggaccacctatagggtggtggtctcataagattgaaaaggagcaaaaacatttctatggcttaatgactttgtagcgattgtaacatcatagcgcaatgcattattcaggggtctgtggtgatgctggtgtaaattaacgtgctgcactactaactgtataagatacaattatacacagtacataatactgaataataaactgtgttactgctttatgtgtttactatactagacattgtatctttcttttagagtgtactcttcctacttataaaaaaattaactgtaaaatagcctcaggcaggttgtttaggtggcattttagaagaactcattgttacaggagatgatagcagcatgcctattattacccctgcagacttctagtgggacaagatttggagatggaaggcagtgatattgatgagccttaccttgggtaggcctaagctaatgtgtgtgtgtgtcgtaatttttaacaaaatagctttaaaaagtaaaaattaaacatagcaaaaagcttatagagtaaggatatgaagaaagaaaatatttttgcaccgttgtacaatgcatttgtgttgtaagctaaaggttattatgaattaaaagcttaaaaaatgaaatgtacataaagtaaaaaaagttacagtaaattaacattaatttattattgaagaaagaaattttataaaataatttcagtgtagcccaagtgtgcaatgtttataaagtctactgtagtgtacactaatgttctaggcctttatcttcactcagactcactcattgactcacgcagaacaagccctccaagctccagtcttgcaagctttattcatggtaagtgtcctaaacagatatattattatttctattatttttttaccatttacactacatttttactgtatcatttttatgtttagatttttttttaggggggagggtggagtttcgctcttgttgcccaagctggagtgcaatggcatgatcttagctcactgcaacctccacctcccaggttcaagagattctccgacctcagcctcctggtcttacaggtgcacgccaccatgcccgactaattttttgtattttagtagagacagggtttcaccaggttggccaggctggtctcgaactcccgacctcagttgatccacctgcctcggcctcccaaaatggtgggattacaggtgtgagccaccacgcccatccatttttagatatttttagatacacaaataatgtgttacaatagcctaaagttttcagtacagtaacatgctgtacaggtttgtagtctaggagcaatgggctatagcctatagtctaggtgtgttgtaggctgtaccatctaggtttgtgaaagtatactgtatgatattgcaaagctacaaaagcatttaatgatgcatttctcagaatatatccccattgttaagtgacacatgactgtgtattaatcttaagtgaaaaacattctctgcaaggaaaaacctttttatctgcattgcatgtacaaaaaacacacaaatatttccatttcagaaaagtaaatgaaatttgtaattaaaaccatttttattactaataaatataaacatcatactgtacatactctcaaataaatgttagactttttaaaaaatgtccactttatgtaagaaaatacttcatgtatttagcagaagaatgattgatctaattgcagtatacagctccaaagagtaggagtaaatattttgaagaaagcatgatagtctttctcattctcatattgtattcctccatgactcttatctttctcaatatcctggtagctttcataatttatcagagccatttttgaggctattcatatgaaggattgattactgtggaattaataaatgtcaaaggtttatacttctatcatttctttatttgactaatatttaatgggctcaattatgctccaagcatttagttacctttgcatgcacttttgtcatgtgttagatttactttcacacctctgggccttcacacatgacattcctcttgtctggaatgaccttttccttattctttacttgaatttttaatttgcctttaggtcttaagcaaggtttgacctcaaggaagctttctcaaactctctggtgcagtgtgattaaaaatgttcctcttcaggagtcacagaggattctttgctatatctgtaagtgtacttatttctacatattataataattaattttttctgccctatgatcagattctctataacagccaagagttaagggtttcaaaattatttatttaaatgaattcactatacacttcagatagttcttagaaataatcataaatttagaattttgcatgtttgtcatttacatgtagttttgaaggatcacaatttttaaagtcgtttctactatgtttcattaaactactatttgttgaagaattatatgtgccacataatgtgatagaaactgaaattggaccatataaaatgactatataaatagactttgacacacttctggttctgaacgtgatgagcagggaatattacattattacaccaatcctctcactgagaaaaacaatggcaataacaattaaataatgcttacaagatatgcattttaactataagcatacccagcattcaaagtatactgatgataaaaagatttaccatgttagcacaaactaaaagaataacacagctaatgaatataacataaaataaaatactggaaaagacttattactagacataagaataatattttataatgataagtgctaacattcaagaagaaaaaatattacatttttatatactctatacacaaaaaatgatgactataatggaagtgacaaatccataattatattgcagattttaaaaacccctctcttagtaaatgacagaaaaattaaactataaaatcagtagggaaataagagagttgaaaatacatttgaaaaaccgaatcgtattttcatatataaaacataagagcaacagtagaatattttatttttaatttcacgtgaaacattcaacaaaatagaaaatatctgaccaaaatttaaaaccaatacccacaagtcaaatcttaacaaaattttaaataatgacattattgagtgtgtgttttctctgcacagtagaattaaactagaaataataaataataataaaactaaaaccacatgcctttagacatttaggaatacacttatatatgaatattataacctatgatttaaagaagaaatctaaatctaaatttgaatttattttggtcatgagttataatgaatatatgatagaaacttgtagatgcaaaacagcaattcttatggaaaagtttctaacaaaaatgcacttattagaaatagagactgacaatcaataccttaaggagtaatacacccctcacacctacacacacaaaactagcaaaaaaggaaataataaaggtatgagcaaaaaaaccaatgatttagcaataaatcatataaaagagaaaccaaacaaggctaaaagttgttttttaaaagataaataaaatgctcatatctctaggaatgttgttatacttaaaaaataaaagctatgagttatacttagtaaaaatgaagaaaagaaattcttttatcagttagaacatgaaacggttatcagaggaaaacaattttatgtcaataacttttaagttatatgaaatagatcaactttttgaaaaacaggattttccaaatgaattcaggaagatatagaaacataaatagtcctatattcagaaaatttactgattcaataatttatactattgtcttaaaaagttaattgtcagttgctataataccttaaggaagaactaatgtcaattttatagaaactgttttagagaatagagaaaagggaacattttcaagaaattgtatgcggctagcatattactaatactaaaaccttacaaaaacagtagaaagtaaacttatctcttttatgaatattatcttcatgaatataaatgaatatgaattcattctgtcatgaatataaaatcaaatattttaagcaaaatgaacaattggaagtcagtatatgtaagaagataatatataatggaaaggtttacgttatggctaggttgaatttagcaatttttagcagaactactatacatattagcaatatagaacacaaaatcatctaatgatttttattaggtgtgaaataatgtaaaaaatttgataaaattcaacatctgtgtatggaaattctcttagcacactaaaatatcctaattcttcaatttgatgaagaatttctacaaatagcatatcaaaaacttcatattgggctgggcatggtggcttacgcctgtaatcccagcactttggaaggccgaggctggtggatcacctgaggtcgggagttcaagaccaactggaccaacatgaagaaaccccatctctaataaaaatacaaaaaaaaaaatagccggaagtggtggtgcatgcctgtaatcccagctacacaggaggctgaggcaggagaatcacttgaacccaggaggtggaggttacagtgagccaagatcgcgccattgcactccagcctgggcaacaagagtgaaactcagtctcgaaaaaacaaaaaacaaaaaaactttatattgactagtactatattgaaagcttgttttctgagactgaacatgataaacatatactgtatcactgtttctatctaacatagtcctggtagttctaaaaatcaggcaggaaaatgattttaaaaaacaaatgaaaaaataaaacttaggcacaagtgtcatcactgttgtctttatccagtcaggctgctatagcaaaatacattaatacattagactgggtactttgtaaacaacagaaatttattgcttacagttctggaaactgggaagtccaagatcaaaatgccagccaatttccctggtgaggacttgctctgtgcttctttaatggcaacttgtagctgtgtcctcacatgacagaatgataatcaagctcccttgtgctcttttataagggcactaatttcatgcatgagggtggagctttcatgacctgattatctcccaaaagcctcacctcttaataccattgcattgaggattagatttcaatgtatgaatttgggggtgaggggtagaaacattctgactatgacaattgtatatgaagtttaattcgacaggtaaattaacagaattaagcagtgaatttagtagggttgctaggcaaaaggccaaatacaaaaatcaaatgatttttattacagtaatagcaactactagaaaatgaaattatgtataatttaaaataccatcaaaaatatctcacaccaaatcaaaaacattgagaacacccaaagctgttgaggatgtggatcaacaggaagactcactcattgctgctgggattgaaaatggtgcagctactttggaagacatgttggcagttttctacaaaatgaaatgctcttatgaaatgatccaacatttacaccctttaatagccactcaaatgggttgaaaagttacacccatacaaaaacttttgtcagcgcactcctgaaagcactttttatcatgacattaatccatttatgagggtggatctctcatggcctaatcacctcttaaacatcccacctgctaatatactgttacaatggcaattaaatgtgaacatgagttctggagaaaacaaacattcaaactagaggagtcaccatctgcgaaaattgatcctgtgctcatttcatgacctcagcatttcactcataggtaaattctcaacagaactaaataaatatctagaatatgtattagaatgttcacataagctttattcataatgacattaaaatatacttccactttacccactgaaagcatttatgttttcataacattatgctacagtagtacttagtaattttgaaaatgttttgaaaaattagcaagactcctttcagtctaaatcaacttcagtctttatatttaatttaccaggcatattaaacagtgaacacttacatataaataacccatgtctttcatgtggtttccttggcattatgtataaatatttgatataacaatacagaaaaaaatagaagttaaacatgaatctctcttaattatttgcaaaacatttgattagacttatggtgatatgaactgttaaaaacatcctttcttatgaatagtcttgaagtatttgaataggtcaaagagataattaattaataggcagaagaaatatttgtcttgaatctctaaaacaacaacaacaaaaaatgtgctttcctttctcttttagaaatgtcagaaattcccctcctaaagccgactttataatttaaagttttaattcactcatgcctgtaatcctagcactttgggaggccaaggctggcgaatcatgagatcaagagattgagaccatccttgccaacatggtgaaacctcatctctaccaaaaatacaaaaattagctgggcatggtggcatggcgcctgtagtcccagctactcaggagcctgaagcaggagaattgcttgaacctgggaagtagaggttgcagtgagccaagatcgagccattgaactccagcccaggtgacacagcgagactccgtctcaaaaacaaataaataaataaataaaataaataaaaattttttaaaaagttttaattcacatttaaaaccgttttctagaaagtacaatacttcctattaatctcagtcactctctctgtctctcttcctcttacgcacaaagtaaaaataaaatgagatttttctaaggttagatggtgagacctctttcatgtgaaaccctgatttcatgatatgtcttaaataatgtgtgaggcatatttaattaagggatgggggggcagcaagagatgatggtgttgtctgttcttatttacagactactatgaaaagtgggactatgtgtggcagatcctttaatttttcagtgtcccgtctctaggcaaacctgttttcagcataacaatttgagcgtgtgatatccatttttctgctctctgccacaggttcttgtttaaacaaagggagaagtgcagttaggaggtagaactgagttcatagcttacctccttccccacaagaaccaaatgagaatgggagcccagagacaaatgtcccagattatctcctttatgcagacaattctgggaggcatatgatgctcagatttcctggatgaattgagtccttaaaacctgactgagaaaattcagtctcacacctctttttccactctcctgtatctgacatttcttttccacactcttatttgctggagttccagtctttccccctcactctaccacacatactacctgtaccctagtcttgtttcataatgtgatttttgaggtaacataaaattaaaaagctgctttgaaataacgcaaaaagaagtgtcatttgatttaatgtgtaaaaagcataggaaagctgaaagttactgagaggtttatattttaggatagcatagaaataatcatagcgttatagctaggaacaaaagtgtatctatcctctttccttcaatacattagtgaaaatataggttatataccatttgcaaattgcagatagtcaaatgcaaagctggagagtaaaatcttcttagagatgaagttagaactcagaaatctttaaacttgtctagttagagagaaatacttatttcctgtaactactttgtttaaagcttttatatatgatgtcatttagttggaggacaaaacaatagtgttacaacagaattcttaatgttttagtgccatttacaatgaaatgtcacaatctgaaacttactttgatttataagcagttctcaagctttatttttcaacaagttccttccacttatctcttgtgtttctctgtaatgttgatgtgcaatgtatgtgtatcaagcaaagagtataaaaataaaatcttttgggtaaaaatttctcacaatatactttccaatatattatgttcacaagtagtttgttataagattctttcttttttttcctgttgcataaagcagaaaatattgtataaaaagcagtgaactatcatttacatttttctccaaattacaatatttagagagccttaggaactttaatggtactgcttacctgatgtgctcatagtaatctgtttattatagtgttgcttaaactactgctgatttacatgttaacaggcatattatttaatcaatgacatcaaactctggtattgagagtataactgtacttcttcataaactggtggattgcagagctgtgttaagtaaaacaaataacaatttatgtctcttgttagaacatattctgctgcttattttcttttaaagtcttttatgtggaatcaatgtcaggagagcattttatactaatttttgtttttactctttaaagtacgttaatggcatcttctggtttccctattgagtttcctaaaatggaaatttgacagctaagtataatatacagttcattaaatttgaaaataaagtgaatctctgcatatttatagtacaataatggattcattctgataattgctaaggtgttttgagccaaaagtatgtgaaatattcagaaagtttggaaatatatggcataaatatttgtttttgaggatgtataaatccaaaactaagatggatctggtgtatgaatgcatgttgaatctgttgagtaaaggtttttggagatgagcaatttccttctgcaaggtaaatgcaaatttttcaagagagcagagtgttgtgtgcaaaggcagaaaagatattaactaaattacctgctgtcctggagacattaatttgcttcatcgagaaaggtattctcagagtattttactgattcagattcatgatggggtcgaatgcatatcttcctgcttaacagtcaaccctacattaaactatttatgaaggataaaagtaaattgatcatgtatttctcaagttcttttgaaggtagcaaatagattaaacaggatgtggaagagtttagacttcagataatcctggctttctgttatattaattaatgttacatgcttgttagtatataagtctctaatttcagtcaaaatctctatttagcttaataacatttccagttcctggatatttaatggctgacattgaaaataagcatgtaatgcctgtgtcttcctaaccatgtagaatgaagattatagtggctattgttatttttattattattacatagcatattcagttgtgtggtgtgacatctattaattgaaaaaaaacacaagtaaggacattgcaatagtaaatattaagaaagcttaatttcaaccaaaaacttagatgttaattctgtgagcataatttttggcaaaaaaagaagtaagcaagttatatttttttctctattctttaccattgattatagcaaagttttattaactcaccacacaacaaatacaaagggaaaagatagaagaggaaaaaaaggaatgccttcaactactcagcgattgagtacattatcaaccctctcaccttgcttgctcttattagaaagaaaagatacgttaagactagttcaattttctctacaaatcagattcagtttacacacacacacacacacgcacacacacacaatacacacatatgtcctaaattttccaggattttttgctacattaaagattataagtataattattttataggcttattatattattattaccttattttttcattcgaataatgattttagagcacatacacatatataaatgtatacctactgacatagttctacatgtgaatatattgaagatatacctaccatgcttaatagagaaagcattcgagttggtgagttaattatttgtaattttgccacaaaatttcagacatatttatttttctttttgtctttgaggagacaaacccattttattgtctatcgtgttatataaaaatctagaaagaatagatttgtacagaaaaaacaaatgataataaatgggagcacaaaagaaagaatttaaatttgctatttttcccagtggtattaagatgacaatcattttaaagcacatgtgtctggcttcagggtaggatttgttcatcggccaaagcctgccataaaactatggctttcagtgtctgtccgttctactggctcttgacagaacttctgaggtcttcaagaaaagtcatgtactcctgctcctccagggctgtgctgagctccattagcttatgggcaaaagggttggccacccctccattcacaaggaaatccactaggtggtcatataaggccgagtcccggaaatctgtgttgagtataaaattagtgtcctttcattgagactccccattggactgaaagttacttccctgatagagaaaaggtcactctcaacctcctcttctggcccaccctcatcctctgggtagtgacagtccagcacaagggccttcttgccaccactcttcaaaacttggaccacgaaattgggaggtgatgtcaattcaggctcctgttctccaacttgctgccctttcgagggttcctccttgccatcaagtgtcggtgggatgctgttgttaatgttgaaagtgacagcgatctttccccggcagcttttcccactaatttagcttctgtcccatttaactgccgctcccatcctccagacatcttagggagggttttatgcttctggattttcctctcctcctcaatttcaccattcaggatatcaacagtctccttcggtgtgcagcgcgccacagccactggggcaggacctgcgaggccgcaggaggccaagccatctctgggaccccggggacccggtgcgcacgctgagcagcaccaaggacggggcgcacggccggggctacggctgcaggagctgccggaagggcgcggcagggggttatttttctatttcattttgattatgactataaaatacaaaatcaatgcattcttaaaaagtgctataatgtaaaaattataaatatacaaaacacgaagaatcagcatgtagtttgtatttagaattattatgcagttaatattagcagtgttaaacatgaatttaatagaaatgagcataattcagtttattgtgatataatctgtttaggtgaatcatagtcttcacatttgtagattagctatttttgaaatgtataagatagcacaaagtatgtgatggcataagagtagatgcatgttgaatcttccatgctcacctttggtgtcagggaattatttattctacattacatatgtataagtaccagttaataaatttaatcatgttaatgttgaacacagaattttatgcaaggaatgccctccacccattaacttcctgagtcctaaactgttgagtgtacaaccactgtgaaaataatataatgatgaagacctgctaagtacatctctctagagcagcattttaaatatggcactgcttggtcagctcactataaaaagaagtatcaagactaggtttgagagttaagatcccttagggccaggcatccattctataagacaggcagaggtgcatttcttatctcttcaatgataataaaagctttttatgtactagtatctatggttccagcatcacaaccactcactaagaaattctccagtggttcttacaggatccaaatcaattagtgtggcagtttctcccttcatgttaccatttgcactagtgtcgttaaggcccctactcttacagggtggtttacaagaatccagatctgttaaattggcaagttgtgtagagaataggactatgggatagatggggaatgtgattccaaattccatctaggtctcctgtaatgtgattctccagattggccttctcttctctttatgcaattgctcctcattcctcttgcttttcttccccatacccagtcctctctatttttgttatattagaaacaggttctaagcacaaacactctccagcagtgattcttttgatctctgtgtgtgtgtgtgtatacaaattcttaagtttatatatatacgtgtgtatatatataccacatatatataagtatatgtggtatatgtttgtattctatcagaaagacttccacatataaggcgaaggaaatagagagcaaccagactaatactcgaacgtgtggcacaccctagaaattactaaatcagttattaaaaatatagttaacttcattttcagctacataataaggagcaataaagtgcaaaatgacagtacagtttcatagtgcttcattagtgatcatctcagtccctatttctaactagataatttttgtatggaacttttactctgcatcattatttgattttgtcactgtattagccagagaaccacagaaccaatggatgtgtgtgtgtatgtgtgtgtgtgtatgtgtgtgtgtgtgtgtatgtgtgtgtgcgcgcgtgtgtgtagatatattgtcttaagcagtttgggataaaatgccatatactggttggcttataaacaacagaaatgtatttcttaagagttctggaggctggacgtctgacatcagggtatcagcacgctcgagttctggtgagagctctcttccaagttgcagactgctaacttctcattatatcctcacatagtggaaaaaagcgctctgtggtctcttttataagggcattaaacccattcacaagggctgtaccctcatgacctaatcatgttacaaatgccccacctctaaatatcatcacgttggggtcagaatttcaacatacacattttgagtgaacacaaacattcagttcattgcatatagatatgaaatttttcttcattacatgtgtatgtgcatgtatgtatagacacacacacgcatgcccacatgcacacacatgtacacccatatatgtgtgaggaaggaagagagagaagcaggaagatttttgttaatgttttgttaacatttattttaagttcaggggtacatgtgcagtttgttatgtagataaatccatgtcttgggggtttgctggacagattattttggcagccaggtattatgcttagtacccattagttatttttcctgttcctctctttcctcccactctccacctccggtaggtcccagtgtgtgttgctgccctctatgtatccatgtgttctcattatttagctcccacttacaaatgagcacatggaaattctaccagatgcacatccaaattctacaagatatttcttttaagaaagtggctcacagaactggggagaccggtaaagtccaaaattggcagggcaggccagtaggctggagatgccaggaggagttactgttgcagctcatgtaggaagacaatctggagacaaagtttcctctttctctggggctctcaatctgttttctctcgaggtcttcaactgaacggttgatgcccactcacattatggaaggcagcttgctttattagaagtctactgatttaaatgttggccttatctaaaaactgcctttacagaagtattcacattgttggaccaaagatttgggtactgtgacctagtcaagttgtcacctaaaatgaaccatcatgtcacctgcaatctcatttaaaatgcatgtctatatatcacgatttttcattttgctgtttacattccctcactatcaacttaatatttctacctctagccatgtctgtttctattttcacagaatttaagattttcttatcaaatgcaatcttggtatatttctgttgtctctgctgattttcatcaaaattggatttctttattgttacttctttttgacattctgaacgttgcctttctcttctgtatattttttactcacttgttgtgagtctgcaaggttattttatagttcacctggcttttgaatgaggaaagtctgccaattgagtgctactcaagaaaagtttccatcatttctttttttttttttcttttgagacggagtcttgctctgtcgcccaggctggagtgcagtggcacgatctcggctcactgcaagctctgcttcccgggttcacgccattctcctgcctcagcctcccgagtagctgggactacaggcgcccaccatcacacctggctaattttttgtatttttagtagaggcggggtttcaccgtattggccaggatggtctcgatctcgtgaattcgtgatctgcctgcctcggcctcccaaagtgctgggattgcaggcatgagccaccgtgtccggcaaaagtttccatcatttcacagattaaattgtatgtgtgtgtgttaattattatatattcccgcaactcaacatttctgactagtttttaataatcctgtttataattttatatacattaacagcatcaattttaattgatgactgttatagacaaaatgtttatgtccaacccccaaattcatgtgctgaaatcctaaccctaaggagatgggccttagggccttcgtcaggtgattaggtcatgagggtgaaaccctcctgaatgggattagtaaccttataaaaacagtccaggagaccttggacttgccccttgccccttccaccatgtggggacattgaggagatagccatctgtgaaccagggaggggaccctaaccagaaactaaatttgccagtcccatggtcttgaacttcccagcctccaaaactgtgagaaataaatttctgctgtttataatcttttttatagcttatagctgcctgaacagactaggataacaaacacaatagaaataaaaaattaaaaatgccatccacatagcagtcattttttgttaagcatagactttatgttatatttatattatattataattttatattataaaattttaaatatgctttttcatatgccaccacagtaatcaattgcttacttgctgctaagagccttagtagaacttcatgacattagagacaaacatacctatcccacaaatgcagtgtctgacacaaaataggtagacaatcattaatggttaaataaatatcaattgaatgggattgctagattgacttgacaaaatcattagctttatgtgaggtacctaccatgtggttcaaatgaaatataaaatttggttcatgcccacaagcaattttaaattggtttggagatttctattttaaatacataaaactctaataagtgtcacgaataacatacttaagagacaaagcccatacatgcattacactaaccaaaatcagatgatacgaggcagtgtggtttttgcatttttaaaaggcatacagcgtagttgatcagaatttcttaaggccatgtgtagagttctctaagtattgaaatctggcacgtcactttgggccagtctcagagaaaatgtaaagataatcagtttggaactgatataagagtggttactaggggaaataaagatagaacaaagggaaattgtgaaaaagtcactataattgctttataaattgatcaggtattacagaaaactctacaaagcatttgattacagcaatatatttataactgatattaaactgcaaaacaaaacaaagtaaacttaatgagagagaggaagaaaaagagggagagacatggagagaaggcttgaacatatctttgagtaatgcacaaatctgattgcactaagatgaacaagacacctgacacaaattatcttctaaaataatacacccaaataatctacatataaagttaatattaaatgcttattcttggtgttacagaaatttgctgcctttgcacagtacattatttaagctaatttgcttctctgactaatattcataacagaatctcactggtatagtcatcagtgacttactggcaatataaaataattgaaattatcaacagaagaaattaaaggatgaaggtttaaatgatagaactataatacatgccagcaatttctcaaagtgaattacccaaatataattgcatatctctgttgtgttctaaagttcagcagcctggaatgttatttaattatgcatgcattaataagaaactgcatcccaaaaaggggaaaataatggaaaaactgtttaaaacttatatggactacaaatctagtaataatatttaggtattatatgctctattttctattatattccttctagatacatcaaccaaatagcttgagactaatataaattatctcttatataatcatattaatcgatctcatcgccaaaatgtaaggatcaaaatcatactttgtacattattttgttttgaaaatactgactttatgcatctaccttcaaccaggttttgaatttgacacacataaatttgaatttgttaagcttgtctttaatgtagtcatgcagatggatggcatggtttaaataaactttcctaacctattacctctttaaaggattttgtttctataaaaaagaacatagatgttgttaatgatgtttattgtctctctttttgcaatgataatgaaaccagtattgcttaattatgagtcatttccatattactagaaaggtatagtgatttgtcttaagtaatactaattaggacatttactagctgagattaaaatagattataactatctatattttaaagaaaattttatcttcaatgcattcataggatttgggtacaccaaaagagaaactctaaaattcaaagaagcaagtgaagaaaatgttaactataattcaaaagtagtatattctgagagtagaaatatccgattttctgatgagtgcaaatttttctctcagattcttagatgtgagattgtagttccaaactacagtctgaaaatacacaggtgcactttgaactgtctgaaaattgaataaatagttgatatatatacattcatacaagcatgtttgtgtttaaatatttttaaatctttatgaaataaaatgtaaatctgagcactcttttgctagacatatgatgttatttcaatcaatgtatacaataactataactgctaatgaagaaaatatctgcaaaacaaatagaaaatattattttgaagcaggatacctgaacaaaacttttttgcatgtgttggataggaaacacattacataatgcaactctgatttggaacataatggtgtatgttcagaaagaaaattgcttgcttaaaacgtatcttttttgttactttaaaattttttgattgacaaatataaattgaatatatttatcatgtacaacatgtttggaaatatgcatacattgtggaatggctaaattgagctgattaacatatgcataattgtaatttttgtagtgagaacatttaaaatcttccctcttagcaattttccggagtatgtacaatacattaactacagtcaccatgttgcataatatgtctctttaacttatttctcttatctaactgaaattttgtcttaaaaatatctttttatattttaaattttacttattttataaataaaattttagtttttaattcaactcttattttaaatacagggatacatgtgcaggcttgttacatgagcatattaaacccaggttgtgagcatagtattcaataggtaatttttcaatccacacccctctccttcacttcctcctctagtagccacagtatcttttgttcccatgtttaagtccatgtgtgctctatgtttagctcccacttataagtgagaatgtgtggtatttggttttctgtcccctcattaattcacttaggattatgggctccagttcagtccatgttgctgtgaaggacacaatttattctttttttggctttatagtattccatgtcatagacgtaccacattttcttcactcaatccaccactgatgggcacctaggctgatttcatgcctttgctgttgtaaatagcatggcgatgaacatgcaaacgcatgtgtcttttgggtataattatctattttcctttctttatatactcagtaatgagattgctgtgtcaaatggcagctcccttttaagttctttgagaaatctccaagctgctttccatagtggttgaactaacttacattcctaccaatagtatacaagcattccctttttttagcactctcactagtgtctgttgatttttgactttataataatagccattctgactggtgtgagataactcattgtggttttaacctgaattactctaatgaatagtgatgagcattttttcatgatttttggccacttgtgtgctttttttttttttgagaagtggctgttcatgtcctttgtccattttttattttattttattttatgttttgcttgttgatttgtttgagttccctactgattctggatattaaacctttgtgagatgcatggtttgtgaatattatctcccattctgtgagttgtctgtttaatctattgatagtttcttttgctgtgcacaaactcttcagtttaaccaagtctcacttgtcaatgtttgtttttgttgcaatacttttgggaacttagccaaaaattctttgccaaggtcaatgtcaagaaggatattttccgagtttttttctaagattcttgtattttgatatcttacatttaaatctttaatccatcttgagtttttattattttgtacatggtgaaatgtaggggtctagtttcaatcatctgcaaatggttaggcagttatcccagcaccatttattgaataaagagttctttccctgttgctttaaaatgtatgtcttttattcttgctacttgcagactttagcttttttaaaaaaaacttacatcttttaatttatcatgaaaattactcacccaagtacaaattttaaacatttaatactttttatcagtgtgatatatcctcatttttttaaaaacgtatgtctttaaatctgatagtgaaaaactttcctcatctgccttatctcttctccttcttcactttcaaagtaatcatccttaacttgtatagttatttttctaagaccttgtctctgtatttctggattacctgactgaaaggctatttttgattaatgtattttatacataatgtcatgactgctacaaggcagagaaaatcttcccatcaacatttttattctcaccacctctcacagtacatgacaatatttgtttaaataacagataacctttatactatgttcttacaatactaatcaatacaagtccaacaacacaattactcttttgatttgtagctctttattttttattgcactaatttttttctttatttattcttacccgattttctatgtagtaatcactaattttataaaagtaaataacaattctactacttgccttaaaacgtgtttaaatgttcaaaaacaccagttctattctctcctccaccccaccccaaagtcctccgcctagaatctaccggcatctaacttctaattggattgtttgctcattggatctgtaacacgaaaatccaaatgtggtttctttatacaatcatttcgggatccccaattacacatattctgcatagatccactttcacatgcatccctttttttaatctcatttgaattacattcttctttgctggagcacatctttcattatgcttgtaaaaagggccagggatttataaactaccaattaaaaatacaaacatacatataagagcacatataaaatggaatcataaaacataaagatggggaaaaaatgtacacaatatgttaatcaccctcactgtgaaattcaacaaaaatgctgcatatatactattttaaaattttagaggaaacaagtccagtttttaaaggtataatatatttaatattatttaggtataatctaatgattatcactttaaaaataacttaaaatatcttactaacaaaatagtcaaactttgttaggttatctataataatagttttatatattatttattttatataattagctttattttattttatgtcatcaaaattcaattgataatatttttctttactctttgctcaggaagggataaatgttttattaaaggattctttgaggcttgtattcttcatctctaaattaatgaaaagaaggaaaagtttttagaattctatatttttaaagtaaatgtacagatataaatgactagaatttatttagtgcacccaagactcaagcatgttactataacgttgtcctgtattaaataatgcaatccggccgggcgcagtggctcatgcctgtaatcccagcactttgggaggccgaggctggtggaacacctgaggtcgggagttccagaccagcttagccaacatgatgaaaccccgtctctactaaaaatataaaaaaattagccaggcgttggggcaggctcctgaaatcccagctacccgggaggcagaggcaggagaatcgcctgaatccgggaatggtaagatcgcagtgagccgagatcgtgccatcgcactccagcctaggcagcaagaacgaaactccgtctcaaataaataaatgaataaataaataaataaagcagtcctctcaataactcttttacattggtactaaaaatattcacatttatagatgaggaactggcttaggcatacagaaattcagtattttatttaagatcacatacattgtgtttagaagttactagttaaatgataatttattaatattggtaccaaaacaattacttagttttaacatataaatttggtaacagtctcataatttcttattgcaatcatatttattaaaatgtgtcttacattcaaaagataaagtcaacattattcttacctgaatgttacatgttttctagagtggtacaaagataataataagacattttactttaattttccttatgtcagtgcaagtataaattgttaaaagaataattctttcagccaaatattgtaactgaacacttatgttaataacttgaactaggatgtagtcttcatcataatatgctattaagtttacactaaatttaatctaatttgtaacttaactctagttattctgttttatgtttaaagttgccatcgtttctcatggtgatttttatttccttattaatagtaagaaagagacgtgatgtaatgtactatttctcatgtagagaacttttaaggaagatagaaataaaatttacatcctgctatttgtataaagttatgagatacatgataattgcattgttacaagcaagtgcatacttggggaaataaatacatcacaaaggtgaatgaaatagaattttactttttggcgtgatacattgtgtgtcaaggtcataatgagatatagagccacaagatgcaaggaatcttggtctccaagtagattttgtaggaataagaaatagtcaaacatctgtaccgtttagtcaaggagattttctcattgtttgaaaacacatattgtgtaatctgactaaatcatgttcaacaaattaagccttctccaccaaaataaatattcttaagacatgtaaaagattttcagtatacccaaaaaactttcagactctaacaaagacaactttgaagtaagttttgctatttttgttccaatttgagagatcgatttcatcacataaacacatatcatatatttaattattttacattaagttgaaatcactgaaatcaagttagatcatcctgtaaacaaaatatataatcaattactaaagtctgaaacgtaggttgtagaaagacagttttttttagaaaacaaataatgaaatctacatttgagatttctattccctaactaaaagaactagtctcaagatatttacaatcttcaactgtcttctgtttgccttatttctctctctccaaccagatctcttttgtttaatcggatatagaatttcattgaattcacaaaactgtagttagaaaacacgggacctttacgagttgtctggcattgtgatgcagagtgagatgattttttaaatataattctatcatatgttcattctttaatttcattttcttcccttcataagataaaatttaaatgatgcaaaatggtcagttttaaaatgtctttttccttccctcagtttgaattccaagatagctctgtttcagcaaaaataactcttaacatttttaactatcccttttactcgtttggcttgataattttcaagctagataagaaaatcaaatttgttttatttgaatagcaaaataatatttacaaaaatataatttgtcatatgcgtcatcatgaatgtgtacaggttatgtacagttttatatgtttcttcatccaatggtcagaaaattatgaaagtcatcttgggttttgttcagccatcttgaattttgtatgctttctcttttataactgcacacctggctttcttacgattaattttggaagcaggaacagacccagaaagcagaaaaataggctttgagagcctcggtgtactttcttggttgaactgacagtaaaattcaaaaggaattttctaatgaatcctaggaagcatttacatagataaaaataaattagcaaatggcattaggttctgctgtgcttttactgatagacaagagatatattttaaagcaacagtaacaattttgtataatgcattatttctaattaaaaacaaaaaagtgcatatatatataggagcctaatgattaaacttcaattcaacgaacaggtcaaagtaatgtaaaataatgaaaagaagaaataaatcagatgggccaaagaatatacaaagaaacacattaatagaaacagacaatgtaagtgacatttgaaagatcagaaaaccagaaagcaaagtcagcaaaataaggaccgaggatcaaaaggaacaaataaagttgaaagatgtactgtctctacctccaacaccactctctccagagaaccacctctacacttacctccaatacatccaccaccatcatcaaaaataactaacagtatgaaaactagtaccaccacctccaacacaaccatcaacactaccaacactaaaaatgccaccataatgacaatttcataaaaacatattccaaattatacttcccttgcctctgtaatgtggccctgaatttcttcatttttatcactaacatttaaagagcttgcgttaagtgtgagggattgtagtaaatgctgatggcacttaatctgaactcttaggtttaccatctagtgataaaacaaacaaacaaacaaacaaacaaaaaacactaaaggcaacactaaaggcaaacaaataacccatctaacaaatcttagatggaatagaaattcaacagcttcaattgagataggaagtctttgtgcacatgcgtgtgtatgtgtgtctgtgtgtgtttgtgtgtgtgtatgttttaaaagtcacagagataaaagataagcttttaatttctacaatgtatcagcaatgtggagggaaatgggcatatagcatgggacaaaacagagaatccctttcggaaaaggaagagatcaaatacttcaatacttttctattaatttaagaaatgtaactatatagaaatgcttacaaatcaaaaggctcaaactagacatgtgagtctccataagaaaatatcccagccaggcatggtggctcatacctgtaatcccagcactttgggaggctgagatgggcggatcacccgaggtcaagagttcgagaccaccctggccaatatggcgaaaccctgtctctaataaaaatacaaaaattagctgggcatgctggcagacacctgtaattccagctactcgggagtctgtggcaggagaatcgcttgaacccaggaggcagaggtttcggtgagctgagatcccactgctgtactccagcctgggcgacagacagagacttcatctcaaaaaaatatatatatatatatgtgtatatatacacacatatatatgtgtgtgtatatatacacatatatatatgtgtgtatatacacacatatatatacacatatatatacacatatgtgtgtgtgtgtgtgtatatatatatatatatatacacacatatatatacacatatatatacacatatgtgtgtgtgtgtgtgtgtatatatatatatatatatatatatatatatatatatatatatattccagtgtaataaagcataactaaggttcaaaagtaccaaaggagatcatggaatcaaaagttaagaaaagtctgtgagcgtctacagaacaataaactcagcctccagggtcaggagatgtggctagagagaaaagtagaaggcaggttatactaaccttgatgtatatttgaagcatgttgattttgttttaagaggaataaaatgcattattttgagtaaaaatgtttgttagatatgcagtgttaacttttttccatcatatttctattttatttcagtaatatctttgataattttcctatattttcttatctttgtggaaggtctgttgtttcctattttgaatgttttagcaaaaaatgaaatctcattagtgagctgataggataagattataaagctaaaatttttctctgtcagcttatgctactacagccacatattcactggaatatggatttagttgtaaattagaattaaaagcaagtatgtaaacctcttaacatagtgagtggtacctatcacaagtttggaattccaaagtaaaatgactttccatctaaaactttataatctaacagtaatcagttaaccattataatgaatgaaggcattgttatacattcaagggcccagcaattttagttcctgagaaccatttttgaaaagctgtaacaaaatagtgtttgacaaaaaaaagttaaaaaaaaaaaaaacaaagaaagcaatttgtgagatctgtgggcagaaaatttaaccagctcaaagagatacaggagagtagtcattaagaagaaacatggaattggtgaattatttaatgtgttttattttctcttttctcttaggagaggtgttctaattttctaactcaacagaaattttcaaattaatcagtgtcatataaaaggaaaaaagttttaaagaacaagtaaattattaattgagtaaaagagaacgttatgtaagtcaggaaaggtagtcataagtgattttattatttacaatatttgtacaataataataaaaatactgaatgttgtttcacacaaagtttctagtgtaaaggtatttgaaaaatagaagagatcgtatttgcagtggtattgtgaggtgatatcataggatacctaaattttcttttcctataaattctgtcactagataggattaaacagtttagaataaggagaagataatattttgggtacattaaatagataaaaataaataacataagaaaaatttaagagttaaaatttgtttagtctgacaaatcaaggataactatgtatgtcaaggaaactatttttgtaataagtcctatagtattatttggctatttaagcaacatttatgtaagcattttacttttaatttaaaatctataggaacatatttaatatgtattaattatttatttagaagttgaagaaaagtattatctctatttacaaaataaaaagtagagaaaacatacatgactactacccaggttgtattaatctttgctgataagacaaacaaatgagaaacaaaaaaagaaagtttgcccaacttgagtatctaatttcattgactatgtggtttttttaaaattataactggaaaaagttgaattaaaataaggagtcctgggtttttttttccttaaggtaccatagaagtattgatggttaatgtaaatatagttaagcgcacacacacacacacacacacacacacacacacacacatacatatacgcacattatacttccattgatttcaagtatatagttagagaaattagctgcatggcttattgaaatttgttttttattgctttgcatcaattatcttcataacattagatgtgaattagtttgattagtttgatgaaatgttcagattgagacacctcaggcataaatcaaaatggatttaatttaatttccatttgtgatttgattagaatcatattgcagctaaacttatgcagatgggctagaatttacactgtttttattattacttgaatagcatttttagaaaacctaatcactaaaaaaaaattaagtgacatttaaagagcaaaatttccatatacctactgatggaactccttgatttttctgaagaatatgttttatgcttcatttttaaaatttgatgttttcagcattgtttctgtatacctggagttctatgacagtgtgtatatatcctatgatgatacatattacaaagttgcaagtgaaaataattccaagtacaagaaaatagatcagatttcaggtattatcagtgtttgaccatggtaatgtttaaaatgctcatttatttcatttttattcttaaaagtcgaaataatatattatattctaaacaaacctatgatttaaatttgcattagctaagcgatggaagtaatcttgggaaacattctttaccctaaagaaaatcattatagtgaagattttcaggataatttgaagttcccagaaggtgataaaggtatacttttttcctaacttttaactctcttcctagaccacagggcagaaaataaacatccatgaatacaattataaggtctatcaagagaataaataatatatttgcaataagtttaaatattctaaaccgtgaggaaaaagtttaaatattttacttttaaaaatagtatttctgagggaggttgttatgtatctgtttaattctaacagttattataggtaattattttttaacaaagatctatttcgaagaataaagacatgttcttcctgagtgcaaatatggcacaagttcagtttctatccacataatgctcccagtcatatctctcaagggattttcatcttaatgataaaatgctaatttataatatgaattctttctttatgaagcagctctatgacctactccctaagaattttaattagaacaaggcaacttgtatgtttcaaaaagaggaaaattgtatattcagtggcaacataactaatgctattgttgttcctatttgctctgtgtgtgtgtatgtgtgtgtgtgtgtatgtgttttggttgtttatttcaatgctattggaattcaatttttaagttcaggtaagtattaattcaacaacaaatcattgaatatgatagacagtagtctcatataattttatccaacatattcacttgcttatgagtagaattattattatgtagtagacaaatctatacacgagaaacacttccctaaaaacctataaaatatcttaatagcaattttaatttcgtgaatatttttacatataatttagttaatctagcaattaaaatcaatttcttttttagtttagatcaaccgttgataattttcaaatctttttcataggtcaatatttagaaaaataaaagagttggtttaattcccttatatgtatttacacattcccttttacttactagtggcaaaatataagcagaatcattatatctgagaactgctgaaaagttagccccactctaacgtattaagtctccgccgagacttaaatttttccctactagtcagtacagaaatttaattttaactcaaatatttgtaagtaatttggttttgatgtatcaaagtgaatatttgggtaagatagtctagttcttcagaatcaagtttctaatgaaaatacacagataataaaaattagcaatggtttcaaatgtaaaaggtaagaatgcctgactctaaactgatgtagctagtttttgtttttgtttttgttttttaacaacatcagcgatgaaaacaacaggagcatcaaataagactggtatgattttcattcccaactttatatttaggacagtaaaatgtcactcacttgagtgagagatgatcggcaaggataacaaatctattagaaagtcccattagagttctacaaccggcaacagtcagacttcatttaacttcgacgtattagccacattaaattctcatagtcttatgaacttaatagttcattaatctgttgagcgcagttctatttcaatgtgaagtatgggaatccaaacatgaaacaggcaccgactctgtcctcgaggatctcagaggttaatagaggagacagacacctctttaactggattttagtattatgtgatgaatgaaataataggaacatgtataaaatacagcagagaaggacaaaagggatatttagagacttagataaatgtgtttgccttttaccatggcaataacaattatagctataaatacataagtaatcataatacattggatacttaaaatattttgttatacccaaaagatagaggtacttaaaaacatgctttaccattatagatagtacagagaaaatgaacacttaagcttttgctaaacacttaacattcaatgaggaacacaaaatgatctaaatcaaagatatttatttttcatattattggcatattaagattacagaatgacattagtaattcaatggatatttttaatggatttcatatgttaatagtgtgaaaacttgacttacataggaattatgatagaaatagaaagtatttcagctgtaaatgaggtaagtgcctgaaaaccttggtggtaggtacttgtagaatgatggtgtcacatttccagttgtcatgtcagagatcttagattggatgtgtagcgctgtcatatgactgatatgtagtctttacaatgtcaattattcattctctgggtctctctacctatgtttgaagtcatatatttctccatataattgtgagaaataaagatcaatgtttgttgaaagcatttagctagattctggtacacaactggttcttaataagtttacattgacttgaattatgataaaactctactaggtctatatgtttggatttgcaattatgtggaaagacatatatattttaaattttaacacacatttcaaataacatttattaatttttgtgttatgcatattcacatgtcaaaaacaagtgaaaaatactttgtcattgtatttattttagtgtgctgaaagtagaattaaccaaattttatgatgcaaagttctccgttattaataggctatgattagtgcatatgatgtaaaatcttattgtatcacgtattccttttattatacgattattgactcattgaaattagatgaaagggaatattatatttgctttctgctgtggtttgaagcctcatccaaaactcatattgaattttaattgatattgtggtagaattaaaacacagagccattaaggagtgattaggctttaaatgttccacccttacaagtatactaaagttgttattttaagaatgtgttgtcataaaagtgagtttgacattctttctccacttctctctcatgctttccttcccttctgccttccaacatgggatgacaaagcacaatgggccttaataggcagtgccatgctcttggacttctcagcctctagaaccgtgagccaaatacatttttaatgtttataaattacccactctgtgatagtctgttacagcagcagaaaatggactaagacactggtcttcctaggttttttgttttccttgcaatttactaaaagttaacagaaatgatcagattcgggaaaaatagaacacaactaatttgtattcagacatgttcttctgtttctgctttcattgcagaaagtttaacagagttttgacagatacagttatatgcctgtggttgaagtcacagtagctctgtctgctaagcaaatttatgtatgtcaaatgtcttatcctgcccagctcaatacatgcaataacatcctgaaatgaatttagtcatttcatttcaaatgagaatttctgaatcatatctattctcctgaggttgtttcagaatcttcctcttatttgaaattacttttttattatactttaagttctggggtacatgtgcagaatgtacaggtttgttacctaggtatacacatgccacagtggtttgctgcacctatcaacctgtcactacattaggtatttctcctaatgctatccctcccctagcccccccacccccaattaggccccggggtgtgatgtcccctttcctgtgtccatgtgttctcattgttcaactcccacttatgagtgagaacacgcagtgtttggttttctgttcttgtgttagtttgctgagaatgatggtttccagtgtcatccatgtccatacgaaggatataaacccatcctttttagggctgcatagtattccatggtgtatatgtgccacattttctttattcagtctatcattgatggtcatttgggttggtcccaagtcttaagtgttcttatttctccacatcctatccagtatctgttgtttcctgactttttttttttctttttgagatggagtctcgctctgttgcccaggcttgagtgcagtgatgcaatctccgttcactgcaagctctgctgcccaggttcacaccattctcctgcctcagtctccctagtagctgggactacaggtgcccgccaccacacctggctaagtttttgtatttttaatagagacggagtttcactgtgttagccaggatggtcttgatctcctgatcttgtgatccaccagcctcagccttaataatggccattctaactggcgtgagatggtatctcattgtgattttgatttgcatttctctaatgaccagtgatgatgagcttttttttccataggtttgttggctgcataaatgtcttcttttgaaaagtgtcatatccttttgaacttttgagaagttcatatccttcacccactttttgatggagtagtttgtttttttcttgtaaatttgttaagttctttgtagattctggatattagccctttgtcagatggatagattgcaaaatttttctcccattctgtaggttgcctgttcactatgatgatagtttatttgctgtgcagaaactctttagtttgattagatcccctttgtctattttggcttttgttgccattgctttcggtgttttagtcatgaagtctttgcccatgcctatgtcctgaatggtattgcctcggttttcttctagggtttttatggttttaggtcttacatttaaatctttagtccattttgagttaatttctgtataaggtgtaaggaagggatctagttttagctttctgcatatggctagccaattttcccaacatcatttattaaatagggaatcctttttttctttaacatcttgaatttttatttgagttaacatagtatttcatgctatttcattattctaaggtaaatcaagcatattagaatttatgtgactaccttctctcaaatcaagataggtgaaaaatatactgcagtaaagcatagttaggttttgaattcattttttaatcaatttgcgaagttgaacaactgttctttacaacattaagaaacttattctaaatttttcatttgatgtcacaggcgggtcccataatttatcaatttatatttttcttaaagtgtgcatggattgcatcagagagatttccagcatataatcaatttcctaggaatcaacttctctatttttccatgaagtaaagacttctgttttaccaaaaatatccgtaaaataataaaataaaaagattaagcaattcttagtccaaatggaaaatattaacacaacattttgagaatttggtacgtattagaatccatccacatatatctagaatgttctctttacactaccctaatcttcaagagaagtttaggcattctttttaagtcttttcagttttaattgttcttaactaccacattctttttctatatattttcactgctaaaataaatgttaactatttatactcaactgcatatcaacaacttaatttgtttaattcatttattttaataacttttacctctttttaagagtggatgttggttttaaacaataagtcctggtaatacttttcttcacacatgatgtctgtatagcactattaataacttgagataataactaagttgctctattatcatcattattcctactcccctatggagctattaaaaatttttgaaaagataaaaaatgtatttggtgaggtcgagtaaaacataatagacttttttagtgaagagatgcatccaagtttgactatgtggctatcaacttttccagcatttctaatctaccaaaaagaagacacggtgtgtttacattttattgaatgggagatgtaattatacaactgctgttacctgttaaactactcttcacttgtgaaaaggcaaatgctagtgatagagaaagggggcagggaagtgctgggaggagaagggtgggtccctggtgagggctccactctcaagcctatgcccacagacctaggtgactacaggcactcttgtctttgggcccaaatattgcatttcccaagaccaccctggtccaccacacccctatcctgtgccttaaaaacctcaagaccctagagggcacacacacagtggctggacattgagaggaacacactagttgaagaaggcacaagaagctggacatcaagaggaatgcatcagcgttaagagcacactgacagatgctggcaggccagcaggccattgaccacaggaatgacaaaatgtttggcctgggcagtcagaggagagtctggctgctaagtggcctgatcccaggggaataccatgttcccactccatctcccttctggctcccccatctgctgagagctacttccacttaataaaaccttgcactcattctgcaaggccacgtgtgatcctattcttttagtagtacaccaaggcaagaaaccctgggatacagaaagtcctctgtccttgcaataaggcagggcatctaattgagctgattaacacaagccacctacggatggcaaaattaaaagtgcaccctgtaacacacgcccactggggcttcaggagctataaccattcacccttagacgctgccacagggtcagagccccagagcctgccagtttgtatgctccccctagaggtttgagcagtggggcactgaaaaaacaagccacaccccgattgcatgccttgcgagggggacaagggaacttttatcatttcactaatagttgtagaatacaacagtaatgttaatagattcaaaactgtgtatttttttaggagttgaagagagcaaaaggctaaaaatgcaaagagcaacattcttctcattatagctttgagtgttgcaggagagttgttgacattccttgaacagattaaagatctgtattaaatattagtcatagaggtgtattagagtcatattttatttctgacacagaatgcaccaataaaccaggaacacagtatgcacaagggggtggtaagtgctctcggatgtcaaaggggtactgtattagtcccttttcatgctcctgataaagacatacctgagactgggccaatttacaaaagaaagagctttaattggagttagagttccacgtgactaggaaagtctctcaatcatggtagaaggcaaggaggagcaagtcacgtcctacatagatggtagcaagcaaagagagcttgctcaggaaaactcccctgtataataaccatcagatctcaagagacttactgtcaggagaacagcatgggaaagacctgcccccatgattcaattacctcccaccgggtgcctcccacaacatgtttaaagatgagatttggatggggacacagccaaaccatatcactccacccctggtcccttccaaacctcatttcctcacatttcaaaccccatcatgccttcccaacaatcacccagagtttcaactcatttcagcattaactcaaaagtccacatagtccaaagtcccatctgagacaaggcaagcctcttctgcctatgagcctataaaatcaaaagcaagttagttacttcctagagacaatggaggtacaggcattggataaacacagccattccaaatgggagacattggccaaaacaaaggggttacaggccccatgcaagtccaaaatccaggagggcagtcaaatcttaaagctccaaaatgatctcctttgactccatgtctcacatccaggtcacgctgatgcaagaggagggtacccatggttttaggcagctccaccattgtggttctgcaggatagagcctccctcccagctgctttcatgggttggtgttgagtgtctatggcttctccaggcacacggtgcaagctgtaggtgcaagctgtaggtggatctaccattctgggatctggaggacagtggcccacttctcacagctccactaggcagtgccccagtagggactccgtgtgggggttccaaccccacatttcccttccacactgccctgtcagaggttctccatgagaactctgtccctgcagcaaacttttgcctggacatccaggcgtttccacacgtcctctgaaatctaggttcccaaacctcaattcttgactattgtgtacccacaggctcaacaccatgtggaagctgccaaggcttggggtttgcaccctctgaagccatggcccgagctgtaccttggccccttttagtcatggctggagtggctgggatgcagggcaccaagaccctaggttgtgcacagcatggggaccctgactctggcacacagaatcatttttttctcctaggtttcagggcctgtgatgagaggagctgccatgaagacctctgacatgctctggagagattttccccatgtcttgaggattatcactgggctcctagttacctatgcaaatttctgaagctggcttgaatttcacctcagaaaatgggattttcttttctatcacattgtcaggctgcaaattttccaaacttttatgctgtatttcccttttaaaactgaatgcctttaacagcacccaagtcacctcttgaatgctttgctgcttagaaatttcttctgccagataccctaaatcatctctctcaatttcaaagttccacagatctctagggcaggggaagaaatgcttccagtctctttgctaaaacataacaagagtcacctctgctctagttcccattaagttcctattctccatctgaggccacctcagcctggaccttattgtccatatcactatcagcatttttgtcaaagtcattcaacaagtctctaggacattccaaactgtcctacattttcctgtcttcttctgaatcctccaaactgttccaccctctgcctgttacccaattccaaagtcacttccacatttttgggtatcttttcagcaacgcccctctctactggtaccaatttactgtattagtccattttcacattgctgatagagacatacctgcgactgggcaactgtacaaaaaaaagaggtttaattggacttacagttccacatggctggggaaacctcataatcacggtgaaaggcaaggaggagcaagtcacgtcttacatggatggcagcaagcaaaaagagcttgtgcaggaaaacttcccgttataataaccatcagatctcatgagtcttactcactatcatgagaaaagcacaggaaagacctgccccaatgattcaattacctcccaccaagtcacttccacatcatgtaggaattaaagatgagatttgagtggggacacagccaaactatatcaggtacatttctcaaggaagggcatggctgacaactagaggttatttactgagaactcctttggaagaaaggatttagtaaacatctccacttggatatggaaaattacctcagacctcacaaaaaaccatcagaaaaaaagtgtattgcttcagagattcatgcaaagaaatatgtggtccttccagtgaaaagaaattagtttccccatagaccttacagctttatctgaacatagttttgtctggatacaagtgagagttcattaatggaggggtcttgtacagataactgtagcacgattctcttctccagagaattgtagccacataattgtgccatggaagcagttggtcatgcttatggtgatgtgtgaaacttgggacatttgagagagtgaataaatcctagagcaatttagtgatcaggtaatctagcactcaaactatactctagggagtaaaagagggaccattacaattaatgattatgctggaacaatttctaaaaaaaaaaaaaaaatcccagaagtatcctgggaaagctgtaatctatatgaactctaaatttgaaacatggtttattcaatgcaagatggcatgtaatgtttaaaccagaataatctttatgaattcagtaaaatatatgtgtagcaaaccagcccaggaaacttctaaacatagcacacacttaacttctgtctttataattatatagcctcaaaccaggtgctatagtccagatgtttgtcccattgaaatgttatgttgaattttgtccccagtgttggaggcagagcctaatggtaggtgtttggatcatggagttggatgcctcatgaatagaataatgttctccatgagggggtggtgagtgaattctcattctatttgttcatgtgagaggtggttgttaaaaagatcctggaacttctctcccctctctcttttgtttttttctttccgcatgtgatctctgtactttggctccctttcaccttctgccatgagaagaagcagctggaggcccccaccagaagcccagcggatgtcagtgtcatacttcttgtacagcttgccaaaccatgagcctaataaaactcacagaaaatgtcctcctggaatattgcttagctgctgttgtggctcacatgtatggaaaaacaaacactctgatactcaaaatagcggatggaaattagcttggtattcaagtcttgatatggaactgggagaaattatactagaggtcaatgggaaaagactcaaacattacataatggatctattagaatagctttcaatttaaaaattgctatagaaaggtaatggagtgacagggtagtacatcaagccaacattttaaaatactagagaactagaatgaaacatattacctcaaaccagaatactgagtgttacaacaaaataaaagaagtgaccagttcactttgtcagtggggaactactgggagaagaatcacgagcaaaaggaaggtgagacacaagctatttcttcaaagagattatgtaatttccaaatctcagagttgggtttggcatgtaacatttcaccagagaagcacgtgagtgtttttctcaaagcattagtttttagtctacatcattcaaccttgatgactcaagtatcaaaatatatcgtcaaaagaatgacttcatatatgggagatggataactgagggtacagggagctcttagctttctaattcaggtaactaattgtaggtactgagaaatataactgatagttgtattgacttaatataaactacacatggtttgggagaaaatttgcattatggttttatgctccttgttgagtgaacactgtagtataaactctaaagctactctttttgcaggagtgcagttagttttgagtgaccattttttcaaagacctaaaatttcaataaggaaattatttgacaataatttatctactacatcccctaccaccactcttggctataacttgcagcaatcagcttggtacttttctggaaagcactgaaaataatatatatatataatatttatatattatatatattttaaaatattatatatattttaaagtgtgtatctgtgtttgtgggaggggttgtctttgtacttttgggctgctatagcaaacataggataaactgggtggcttatcaatgagataaatgtatttttcatagacctggaggctagaaaatccaaaaataaggcactgtcagattcagcatctagtcagagcaccctttctgtttcatagacggccatgttttcactgtgtcctcacatggcaagggcgtgaaagattgctctttgaccactttcaaaaagagcactaatccagttcgtgaggaatccacctttatgaattaatcagttcccataagtttcatttccaaatatcatcacattgagggttaggttttgacatacacattttaggggaatacatacattcagtctataataggaatattaataaagtcaaggaaagaaattgacttttgtttgtttttaatgtaataaagcacaaagttgttccaaaaggcttttcatcttgattttgcaaaactttatttcctagctgttgtatagaagactgaccaagaagggctattttccttcacccgttactcccatgggcagtgcctgaaaagtaataatctgcatgagaaccagtgaaaaaggagtactttctgaagataaggcagtggagatttaaagtaaggaattaatgacagtgaaaaagagagagaaaatgttattattttgtttttctaaggagaaaattatataaactgaacagataaaattggatacagaaatggagaaatgtcagtatctctcttgcaccatctgctgtgaggcacatgtgctctattaaaaagttctaggatttcttagtaataaagtatatcttctcaccctttcatatgcgaaggtcttatatagtaaaaatgtgacacataggtatctggacataaaatttcattttcaatttatttgaactctagtattggtaagtataaaggacattaaaatggagggtatcacattacaaacatggtttgagtgcttgcctgctaaatgcagtgggcatgctggctcagttgttaagtatttaaatatatctaaaatacaccatctatttaaagtctggtgttcacttttcaacctcggcaaatatttgctctattgaattgtaatacttttatgtttccctacttctttaattcagttatctagggaggtcataagctgtttataaatatgaagtcttttgtgaatatccagaatcaccaaagcatgagcaaaatcaaaaatgaaaacacaatttaatttgtcaagcatgcttttctaacaatccatgaatattgcaggaaaaatttaatcttactcttaaagtaaatgaatagctacaattaattttccagttgtttaagtagtcttaggcagttagatattttctgtgaaattacatttcaaatttaactttgaaaaagtattttcaaatataactcatgtattataataaattgagaactcatgccattttggaaaactgtggataaatgataccaattttaatttattcttcttatagaaagacctagctcatattacattttgtgttttttgttatactttgaagtttaatttattccttatattttagataaaaagcttttggttgtagataaaatagattcttaagaaatagattctgtctgattccaaaagcttttatttatggtaaatctttttttttattattattatactttaagttctggggtacctatgcacaaggtacaggtttgttacataggtacacatgtgccatgttggtttgctgcacccatcagctcatcatttacattaggtatttctcctaatgctatcccttccccagacccccaccccccaacaggccccagtgtgtgatgttctcctccctgcgtccatgtgttctggttattcaactcctacctatgagtgagaacatgaggtgtgtttggttttctatccttgtgataattttcttagaatgatggtttccaagcttcatccatgtccctggtcatcagagagatgtaaatcaaaaccacaatgagataccatctcataccagttagaatggcgatcattaaaaagtcaggaaacaatagatgctggagaggatgtggagaaataggaacgcttttacactgttggtgggagtgtgaattaattctaccattgtggaagatagtgtggtgattcctcaaggatctagaactagaaataccatttgacccagcgatcccattactgggtataaacccaaaggattatttatggtaattcttaatttgttattttattattaagaagtggctgctttaatacaaaaacacatgtcatttttagtgtgctaagaaatataccacaatgtcttaagtattgaattataataaatatgattttaattttaaaatgtcatgtttgaagcttactgtgtgtaatttaaacgtatgtatttattatatatattaacttatcttttatcatatttgagggttttttaaattggaagtttatttttatgaagactgtcaatatttgtttttatattgtagacactgaaatacatacaaatagacaccattcaccactaaagttttaaaaatatacttctttgggtcataaacatctcaacctgatggccattacatttgatacctgtaatatatttctagaattgctggaagccacttctcatttgaaggattcgctttcttggagttttttcttttctgagcctgtctaccatataatttcaacttgaacttttattaatataccttaccttgtttccttagatggatagcataggtttgaacatttcctgttgttggaatttcttgtttgatttggtatgtgactttctgtttttatttctaaagcgcccctatgtttaatttttagaaacctactctcgtctcttttttgaaaagatggttatttgtttcactcttctctctcacatgcatctgatagggatgggccacttacaggtattcatgtataaaaagaagatattactcatttatggcatacaaaaaatcctcttgctgattaggatgtatagttcaatcaggttagtcttagttcacaagctagaaattacacttggaataccttgttgagtaaatatgtatcttgttgagtaaatatggctattaggaattagacctgaggtctagaaaacaaaattattttactccttatttaatctacttttcactagattgtgctgctattccaaaggcattttttattatttttaataaaagccatggtattaacatgtttgaaatacaagatgagaaatattcaaagtgtaatcaagcagtaaaaaattttacactgctttctctgtgaaataaccagagtttgaggtttctttctaaatcactttttaataaaaaagctgtgttttataaaatttattttttccttccattctctagtgtgacaattttggtgtaacatttccaagttttgaaaacacgagtcttaaatgtgttctttgtgaattcatttgactgtgtgacctagaaatccagtttttcaatacgtctttaacaaaatcaataaatgtatagctacctagagaataatttatcgaggctttttttttttttttttttttttttttttttttagacagagtcttgctctgttgcccaggctggagtgcagtggcgtgatctcggctcaccgcaagctgcgcctcctgggttcaggccattctcctggctcagccttcagagtagcttggactacaggtgcccgccaccatgcctggctaatttttttgtatttttagtagagacggggtttcaccgtgttagccaggatggtctccatctcctgacctggtgatccgcctgccttggcctctcaaagtactgggattactatcatgagccaccgcgccgggccaaggctactgtatttttaactgtacatgaaaaattttatagaagttggattcattacattatgatagaatactccataaatgcatggtatattagatatttctgttttattttagttatgacattaatgcttgaccttactaatataggcagtaagaatattttttaaggtttagaatactgcttttaagataataaactatatattttgtattttaatttgtaagttatatttctactcccaataaatatagtttatattttcaaaagataatgagattttaaatacattaatactaattttatcagctgaaatttaacccagcttaatgctaaaatgtaaaactgaattgattttggcagatggcaatgtttggtagactaaaaattctcaagtattcaatgataaataatttctccttccaagtaaaactgaaagattatatagttgtatttttatgcaaaactagtttggcaatgagaaattaatttttcacaaaatcaggtattataataatattttaagtatatgtagataaatacatatatttgaagtttctgttattaatctaaataattttattcttataatgatttcatatgttaaataaactttgccatttttcttttgttttaagaatttcttcttggaaccaccagttgaatataagaagttcaataaaaagcagattaaaatccctctcacaaagatatctattcttaaaccaaactcaagatccccaaaacaaccttctactaggtgacatacaggtggtgaatgaagatgactacttatttctaaaacagcagaccaacattaagttgtctagggcctttgatacccaaattttctcccatcccacgtataagatgactgcccaactatcagccaactggcaatgaaacctcagcaaaaccataagtctcttcagattttcctccgatcattgctattgtcaaagacacagccacataacttctgcctgaaaagtacaatcttttagcactcctcagcatttgaaggcaaagcaaataaaccctcagaggctttctaattttagcaactcttgtgtactctactccagtattatcgtattggggaagtagacggactaaggttctatcaaacctcaaaactctacatttggatatttttgtaaacatatttcttgagactatggaacttagtttcttatcaatctggacagttattcttgaatttggtccaacaaccaaataaatgaatccttattttattgcctttctaattatcaaagcaaattttaaatagttatcataaaatgctatatccctttcctaaaacatatcagtaaaaatatattggaaagagtttgggatgagatacaaatcagcttttagtatagctgcaagatgatggtcccgggtgaaaactcactgacccagcatagtgaccacatcaactcaggctaatattagacttcaaactcagatgagtctggctgaactagtttactgcatattttaaccttttctttgtatatgaattagaatatttgaaaaggctttaatgttaaaagcaaagagctctatgttttaaggaaaaagtgatttggcaaatagtttaaataaaagataaagttaatattttggttgatgccaatatatgctcatataaccatgaccaatgttgcatcatagaaatgaagatttttttatcatgtaagaaaaaaagtgtgcagggaatgtgtcacagacaaacttaaaaagcattttgtttatttatataactgtatattaaaagcttaagctctaactcacgtgttttcaatgtgagctgatttccatgttatgttaataggtcctaatattttatttgcagcttattataaaagttgtgtgttcagttaaaagaaaagtgctatttttagatcagagagagacacatgttatatgcacctgagtatccacttgtcctctcaaagaatccataatagcctactaagatgatattcttatgtcatattttaacttcaagaatatgatttcatcaaatcattttaagtagtttcaaactcaaatacagtatgacatgttttcagttgaggtattatgaaaataaatatatcgaattttaacactacatattttgttttaagagcctgtaccattgtttcaaaactaacttatttatattagtattccaaagactgaataagctaagaatggattactgctgctgaagttttaggatttgtttactagtgacattcttacctctaactttaattccaatatatttatcattattttggtggtgagaagcaacaactatttcttactttaccatgtgtttattgtcgattccttttactatttttgtttgaatttgtcataaagctattaaagatggaattttaaataatttttatcctcaataacaaaataaacagcatcgtatattgtgctatggtgagttacaagcgttaaagtattcattattcagaaagactctgtacaccacatacagtttgatgtaatctgcagttatgtaagagttgacatggcaagaatgtagctcagagagctgacttacttgtctgatcaagctcctagtaagtaacgaagtagttatccatactcatatccattttacttctgggttttcctaaacaaatggtactgtgtcctttaattatttcctggaattatacagtttgattcagaccttggataaatctgagctaccaatattgcttttgttatataactgtctgtattataaaggtttatatccacctctgttccaacactttagcttgtacaaatgagagcatttcattgaaactactggtgggaactaaatgaaaatcttaaaagctatgttaccaacacctttctctctcttaattttaaatctgaaattcccaattactttataattctaaaatatttgcttttataattctataatatctcttatttaatgaatgacattataaaatttaatttaatataaacaagtgaatgatttagtttcttagaattagaaaaaaatttggagtaatacgaacaagtgtgtgacagaaattttacttctgtgatatttccttatgctctcttccctccctccattttccatgccccttagatttagagacatgaaatcagttctggccagtggacactaagaataaatgtgtcacttccagacaacggcatttaatacctagtatgtgatctttcttttccccagctttgaagaatcctgtgactatatattaagaaaatagagactcatggatataccctgatgattagcaagaaatagaacttaatagggttaagccacggagattccaaggtttatattttactgctgtataacctagtcactaatatagaaacagttatttttgtttaggttttgtttttatagactatattattgcatttcttttaattatatcttattttaaattagaaataacttgatattatattgctttcaattttcacatcctataccgtaattttgtttttctttgcttgaatcacatagaaatatttttgagcaactacagtaagacactctataagttttgaagcattatgataaggcatttagggaaaacagagagtgagctacttaacttttttttagtaaggtcaggaattgctccctagagtagatgacactgaggcctgggcttagagatggatggacgttttccagtgatacaacatggcttagttcatgtcacgcaagaaacgagaaataagagaagttgtaagtataaagaactaagaaaatataaaggggctctaaacatgttttattattgaaacgaagggaacaaaacagataattcggttgctgatggggatgtaccattaatttactttgtcttaaaatgaccatctttttgatattgaggaatctggctcctggtttaaaacttacaggtgattattcaggcctggctacagacctacaaaagtctacagtatactattaatgctgtacctattttttgaaagcaacttgctttccaatttggaagggatctcctaacagtctgcaaaggtatttcctggcaggcctcacaggaaaggcggtgcaccgtgcacactacgtgctccgtgcacagccaatacgctgctgtctctgaaaggagatgcagtcaaggactcaggattccctggccagccatgctcttacatgaccctcttcctccctatctgaggccttgggctgaggtccttttccggtgcctctgctgaggcctttgtaaggggaaaggaaagaactttttgtttgtttatttttgttttagacggagtctcgcactgtcgcctgggcagtggtgcgatctcggctcactgcaaccttcgcctcccgggctcaagcgattctcgtgcctcgccctccggagtagctgggactgcagatgcgcaccaccacgcccagcagatttttttttgcattttagtagagatggggtttcaccacgttgcccagggtggtctcaaaccgctgagctcaggcgatccgccgaccttggcctcccaaagtgctgggattacaggcgtgagccaccacgcctggccaggaaagaaaaatcttaaagacacttttccccattctgacttaatatccagtatttttccacgttaagcctttccctctcatcctttctccttctttccacttcagggtccataaaactaccagagacttttgttctgggctccctcaacaatgagacagcccacctgtctgcactcattctttgctctccactgcagcactgttccaaggggaagaggcacgttctctcgatttagactcttgccaaaccatcgcagtcactgatttaaatcttaagtctttcatttttgtcttgcattaatcagttgctccaacacctgacaacttatttctttctctctcccttctcaactgagctcctgacagacatcttttatgctacagattaaattataaacccaggtagtggacgacatagtaggtgtggtgtagtttgcattcaaaaacctacagttactatcagtgttgaacctattttttaaaagcagcttgcttttcaatttggaaggtgtctcttgacagtctgcaaatagtgcagcctaaggaacatcattatgtagtagcatgaggacagttttacaaatttatctttgattttcttgtaagcatatgtctttcctggaaatctagggtgtatctactttttgccaaccctttgttattagaattgcatcatcaatatagtggacaaaggtgttgtcctttgggacattgagattatcttgttatttgatagtaaaattataacatagagtagagaggttatataacaatgaagtaaaacataaaaggatattgttatatttgccagctgaaaacatgttgctttctgtgttcacaacctgttggtacagaccaaagaaaagtttccaaactgtcagtttcatgtctattgacaaatctatgttgattttcttcagtaagtaaactacactgtaggaacaactataattgagttcatcatgtggttaagtttatgacgatccactggtgttctccaggatccctacctattctgcagaggctaaacaggcaaaacgaaagaggttaagttagctatcccaaatcttgcttatcccaggaattgttattgtcatggatttatttcttgtttaaggaaatacacttccaggagtttcttcagtgccatttaagtcgctacagttctcattatagggagcaatgtaggaattgaaagcacacgccaactggtaaataaccacaggatgtattaacacaggatgggttcaagtatccaccaggaaccctctaagatggtcttctgtcaatactcttttttccaccaactttaaagtttcactatagtggattagactttcattttctgaccaaggtatgtcactagctaataacaatatcataaatcctttaatctgttagagacctaagcagtgctggtcagtttcaaaatctctttactcactttaaactttcaggttgaaagacctcattttcaaacagagagaaaatacattgccacaaagagaaagaataaatccccccagctccccttaagcaataatattttttaaaaaaactctaataactgcattcagttaaattggtcagaaggtttcaaggcaagagagaactgggataagcatcctaagagtaaaggattttttaagttgcctatttttagtccaactgattgcttcatccaggtgatagattttctttttactattgattttaggcatatttaactgcattatatataatatattcaggtaaaatttaacttagctctttggatatgaacagaaagccttgtttatttgagaatcttggggaagtttacaaactactcagttacttgtaagccataaagatttcttatgaagataaatgaaaacattacatatcaattaacaaattcctttgtaaagcccatgtcctggtctggcacaaaaactactggaagaaaaaggatatgcctgtgtgaagaaatatcacgataccaaagtccagataagaccaatttacctgtgcttatatagctttgtaaagtctaaaatccaggctgaaactctcacacagctccacctagaaaaaaattaagggattcatttgtacaatgatcttatccaagattggtttctaatttttacggcatcaaatactcccttttcctgagaatgagttagcagagatgtcacattctttcacagaaaagcagtcacagccccaggaaaattgaaagtgtactactcaggaaaagatgtgaatctatttttagcttactctattttgttatattttactgtatcaaagtaaattactagtgatgctcatattctagcttatattaaacttaactgttattcctaaattgcttgctatattttataagatattaataaacatatacatcttaaatattatgctattattttatgctatgtaattttgtaagatttgtatagtcaccctttgaacacaagaaaaaagtacttccttttaatgcactttaccattgttttactattttattatttgagcttcccatcaactgattctctgcatattactgcaatctttctttggataatagttttatccagtatatattggtattaagatgagcccttcactctcatcttaaatagtattactggtttttttaaatgatcaattttagactaggctgctctccaaaaccatcatgacttggccccataattcttttgagtaatcagaatcttccaggaatgaactccctgagtaaaagttcagtgcacctttgatgacatgcacttattcttttggaaaaggtattaatactttcaagtcacttcagcaccatttgctctatatagccacatggtggtttcaaatcttaatgctgaaattgtcatgtaatatttgggtggaataggatcataaataagtaaagggtgagtcttttataagcttatgagtctcttacataagcatcttcccctgtttctgccctctcaggtctcagattattatttgtgattaaatatcacctctttactggccttattccttgaaatttagaccttcttaatttctctagaccaacagcaaatgctgcatacttgaatcctcaattaatttgtctgagagtaacttccacactttcgacagcattctattgcttagtatgcttttagggtagatttctgctcgtattttgaatattacaagaatcggtgaaatctcaaacagaaatggaattagctgaagctgtgagaagtttcagaagactttgtactcaaatgtaattttgaaacattgagaagcacttgcaaattttgttcattgacttgtttacatggagagatgaattctccaaactgagcaaaatatggaatgggttaataaaaataaaaactagaacacaaaatctttgaaatgcaaataaaatgtggtctattttaggcctttctaacctatctagcctatgttgaagcaaattcctaataagaaaaatcaagaattatttaaccattctagcctatgtagaagcaaatttctaatgataataaattgggtttagaattgaagcagtatttaacaatcacaacattttatttatttgtttactattttttattttttaattgaaacagagtcttgctctgtcacctaggctggagtgcagtgacgcaatctcggctcactgccaaccttcaccccccaggttcaagcaattctcctgtctcagcctccagagtagctgggactgcaggtgcccaccaccatgcccggctatcttttttgtatttttcatagagatggggtttcaccatgtcgaccaggctgttctcaaactgccgactttaggtgatccacctgcctccgcctcccaaagtgctgggattaccagcatgagccactgattctacctgataagatttttatggatatctaactttcataacagtttgaaaacaaatcatcatgtgtcttgcaatagaagtgtagagtgaagatttccttttgtgtcatttgtttgttttgctccatatgactattatggaatacactcagaaaataaatatatatctatattttctaaatcatcaaatgttgcattcagtaatatgctggtaaatgctttatcatttgcattataatgtagaatttcttgaattttgccacgttccattttatatgatgtaaatacttctccaagaccaaatttatgctacccaactgaagtctctggagtcattccaaaatgtgaagaaataccctaaattggctctcataagatgagaaaagtcagtttctacccaacaattgtgtcactcatggtgcatggtgcagatacattagaatgctattattatgcggctaacatgatagcacaaggatttgcctttctttttttccccccagttgtttacatttttaatctctccatgtgaacttttagaatcatctctgtacatatgttcatttcctctaacatatctttattgtatttatacatcacaatctgtcttattgggaaatgatgctatcgtgcaactggcaaaagtgcatgtaataagaagtggcttcccagtaacatgaacaaacttaaatctatcggtccacaatactgaacctattcactcttcttactagtgcatttatctttccaaacaataacagactcttcttttatgatcattcagaggcacattaactaggaaagaaaagactaattccattacattcatttttaaaattttattttactataagctctgggatacttgtgcagaacatgtagatttgttacataggcatacatgtgccatggtggtttgctgcacccatcaacccgtcgtttaggttttaagccccggctacattaggtatttgtcctaatgctctccctctccttgctccccatcccccgacaggccctggtatatgttcccctccctgtgtccatgtgttctcactgttcaactcccacataaacacaatgagcactatttctgaccattctctattcttatgttttccattattttcattgccatgggctatggaaaggaacacttgtgttattcactttgcagagtggttgtgagacagaaatgtgttaatatagcaaagagttagaaaaatgcctcaatgtaataagtgctgtatatgtctttacattactaaaatatttagattccgcatattgtgcttaggaatgtagattaagagataataaaagtaacacggaagtatgcagaacttcgaatgtgtgagtaatttttcttatcactctgcaggtattaacttattttgcccttcccaaactgctatcatgtgggttatattattttatcttttatacaggtgagaaaactgcatttcactgaggttattaaataagtttcctgagtttaggaaagtggtaagtgtcccataagaatttgaaaacagtaagtctggctggtaaaatctttccatacaatttatctaaccattctactgcgtgtcttcacagaatactgaatgagaagtaaaaagattcagagaactagggatgctagaacggggattcatcacatcagctcaatggctgaccgggatccattaagaggggctaacacacatttacttcatgaaataattttaaaattctttggaaggatggtccaacatcactgagagtcttaactggagtagctccaaataaagttttattttactgcgggttgctgagtagcccagtggaatcatgttctgtttgccaaggctggtaacttgattttatgcttttttccgtattttcatccttttttctttttgtacttctctctggttattttctgttgatgtaactttcagtataatgaaattatcatctgagatgatcatgtactttttagatctattttaatttttttagctctagaatttccatttgatttttttctatttctgttctatggtaataatctccattttatcactattttgaatgacgtaaccactattagtgttaactctgctttttataactccaatatcttggacatattttggtttggctttattttccgttttttttgtttgcttgtttgtttgtttgttttttgacacagtcttactctgtcgcccaaggcactggctagatctcaactcactgcaacctctgcctcttgggttcaagcaattctcatgcctcagcctcctgagtagctgggactacaggcgctttccaccacacccggataatttttttgtatatatagacgaggtttcatgttgcccagactggtctggaagtgctgagctcaggcaatctacccgccttggcctcccaaagtgctaggattacaggcgtgagccagcgcacctagccattttctgttttacaccttgatcttttgtttggcattactcattaatcttgaaatgttttaatgaatgcaagatattgtgcatgaggaaaattcaaatgtaaacattctctcaattctatcttctccctaggagcaaaggggcagatcatcacattccagtgactcctttctgaattgcaatcttacaacgtttgggctatctccagtttattttgcactccttaaatatttccttatgggatccatactcaatttggtatttcaattttaagttttatttatttatttgttcatttatttatttatttatattaaaaaccaccctcttttcagagttctgaactccaatattagtccccttaacaacatatatctcctaaaaattcctctttattttttttcttttactttccctttggcttctttacctcacatcctgtgaagcttaacaaacagcagatgtctccatagaaaagcaaagtaccaggtcctcacctctgcttcttccttttttcttttattcaagctcttggatctttacgtcctatcttcctagagagtctggagtgccgctttctatttccatgtgactctggttacttctatgaaatactctgcatattagtagctgtctcctctatggctttataagatatgagttggcaaattctccaagaggaaaagcagcaagcagaatacagggctcagcttagtaggtgtttcttctctgttggatattatttaaagatagcatgtgaacacatttctaagctccatctagttccctgaaagatttcactgtaaagaagcagccatgaaactttagacttattagcttgtcaataaatacagaggagattaaaatcaagatttaatgaattccagcgctctctaaatattagcagattccataatgtgttatggggaaaacagtagtgatccaaatttagaatttgctatgagagttgaatgcagattttctattagatgtcattattaatttagatattaaaaatgactaacacatacagtttaaaaagtttggaacaagggttgattctgagggaggtagcagccagtaaaagcctgaaaagatatgaaattttattatcagtcactgaatacagctggagaacagagtattactgtgaaataggtaggaataataaaaatcagaaagcagattataaagagcattttacatcatgatgaaagcagcctattagatgttgttcttgttacaataacaataaaaattattattattactctaaagacaatcaaaagtttcaagcacaggtaaaacaagtagattcattgtttaaaagaaaagtgatattaagtgtcagagcacagaggtatcactgttgatgcttgtttttagctgtttgaaatgaggctagttgcctaatattgttgagattttgtacctcattaataaaagtgttatttttaccttccctataagtctcactcatgtattaaacatgatatattatagaataaaataaattaaaatatttataaataactgcataaatgcaagacaccagatattatgatacactgacacaatcaaatatttgatttttttattagataccacactgtcattaaaatacattgagtttatggtcaatgttagtacattagataaactgcagagaaagtccattcaaaatcacatatacttgagaaaatgcatgtacagcagccagaaatcacaggatacttacgtatttagcaaagccaagatccaaatttacttaaaatgccctcccagtgctcagatgcaataatctctcatgcacattgtagagaaggtcattgaaaaaagtagcttcagttgtcttattaaaatggcaatgaaactagtcaatattaccagacaaatgagaaggtgaagacgtgtttatatcttctctagggcatgtccaaatgttatgggactacattaaataacgtgtgttctgatttcattttattgaccctggggaatattttcaattcaccaccactcttacatcaattcaaaatgctcaatgttaattcgaacttgactccagttactctggtgttcatattctctctctctttctgtgtgtgtgtgtgtgtgagagagagagagagagagagagagacatacacagagagaaagacagagagatctatcacctgctcatatcaatagaaaacattatttcatccttatggtttttgaatgagtcaattaatttttgtcaaatatgcacaataacccttttcagaaaagacatttatattaccttgcagagtcatttgcatgtagctactggaatttcagatttgcataatctatctagaatatttggtaaagtttatttttcacctcaaagctatgaaataatttatgacatatctattggctgcaatataatttacccataaatattttcttctgaatacacttgattgacatggataaattggcatcacataaaatttattaaagtagaagatacgccattttagggataacatgatacaaaatccataataaacctgcctttatctctgttatgcatttattcattcattaacctgttcatctgtcatccaaaataaaaaaattaatgccaggcacagtttcatttccaaatggttctgttgccttcctttacttgcatttgatttttctagaagtgatatgaccacccccggctaattttttgtatttttagtagagacagggtttcactgttttagccaggatggtcttgatctcctgacctcatgatccacccgcctcggcctcccaaagtgctttgatgacaggcgtgagccattgcacccagccgcattttttaaagctgttttttttgttgtttgtttttttgttttttttttgttttgttttgttttgcatttaattcaccaaagagattcctgtgtatcctaaagatttcaaaaaggttaaatgtaaattaaacgtaagaatcttcctccaaatctaaaatttctaaaagagaaaattctgacaaaagaggtatggcagttttaatttagaaagatattggtgatttgccatctgataaagctgcactaatgtaaactaatttaaacttttgccaactaatttaagcatgtgagcctgtacctacctcctctcaactgtgctaacattcttattaaacttttgaacttttctattgtaatagttaaaacaaaattttaaaaaaagtcatgtctttatgtatgagtgtttttttgtctgcttgtttgtgtttttgagacggagtctctctctgtagcccaggctggagtgcagtggtgcaatctcggctcactgcaaacttcacctcccgggttcaagcgattctcctgcctcagcctcctgagtagctgggacccagacatgccccagtcctctcctgatttcacagaaatatcacatagttacttactcaagcctgaaacataggagatagtcttgagaagtctatgcctcttataaggcaaacctcttacaacagcctagcatttctagcaatactttttcctcaatacctgacttcaggtcaagcaacgactatcccagatgagcatccttgcctctactcctacacccctataataaactcttttccataaagcctttatatgatctgtaaaattcaaaagtccacatagcccagtgggtatgcaagatttggactcagattgtgtgagttcatattctggctctgtcatttattagagatgcaagttttggagacaaattcttaatttttcaaaaccttcattttctcaccaggaaataataatgtctcaatagatatattactctgggaaatactctgatatgagtcaagcacctgggccaatgtttggtaaatgatactttaataaaagttaattagggggtaaattcaaaatgtttctttctgtaccttaaatccctccaaactgcttaccaagagtttcttccattgatcacattaccaaccttagtcacatatgttttcttttgttccacaaatattcaagggctcttcctgcctgagaactttgctcttgtagtcccctctgcctggagcattcttctaccagatcttttcatggcttactcttttcttcaggccttacttcaaatgctattttttcaagtgtctcagtcttgatctccttgtctattagtcatattccatgagacattattattttttcctgtttcagttttagaataaatcgtatcaccatctacagttgtcaggcatatcaatttggggcttgttttctgtctacattctccaagaatctaaactccaagggagcagaactttgtccatcttcctccatcattccctagactatggaattgcatgtcacatggcagaggctccataaatatttgttgaaagaatccatatacgaaggaagagctcagtaaaaaaaaaaaaatgaatgaatgaatgaatttcatccacaaggaccttgaaattaattagtaatgcctttgtgattaccatcggcagtgctctgagatgacagtctggacattgctccactcagaaattctgctacaccccagcagattgcctttctcaactctttaagagcatgaccatgtttatatatgatgtgctgggtataatgagaaattttaccactttgggaaaattttgtgatagcaacatttctataaaactagaatatctaaactttgtaaaagtaatattgaaaaaatagttcatttcccagtatgtatcctctattgtcttgattaacagggtttcaactagtggaaataatttttagatgtattctgtcttcaatttctgtctttcaatttctgctgtttgcagaaaaaaaggcatctagttactaagaggagaaaataaaaattccaaggcaagtgcattatgttgttgcaaatatttgttctggtttattagtacagaagtcaaatttcttgataagaccatatacttttgtatagaaaacacttaaatcattcactttggaaaatgtatacaaatatcagcttttcattttacgtgtatataatgtaaatttttcttctgcttatagtatttatttaactgatagactattaagctatatgtgttatgtatacacaatatacaatacttaatggccaattttaggtttgctttttttttttttttttggtcttctgtgagttacagagaatattttcagcatacttaggagtttccaaaaatgtaaacaaagaagaagatgaattttgtttaagaaaattcaaatacctattgaatgactaatcaattagctttagagaaggatatgaaacatgtgtcccttatgataagattgctttgccaggcttctaaagaacaagtattattcttcataataacttaagtacagaagtgccagagaacagttcgtacactagcaaacttccatgtttaccttagtataatggctctctatttttaaaagtattttatactgggcccctgtcaggcacttaagctttcaatagaaataattctcttcaaagatatctttttctgttgttttgttcttcgtgcagtacaattgacttgctttattgagacaaatatgattttaattgtttttgttacaaaaaataacagatttcttagtatttgggtgtataaattaaaatatggtcagatgatctgatgatatttttgagatatatttatttactacatttccagtctataagaacataaaagaattactggcttgcaagaataatattttgaaggtatttttagaattttaaattgttagaataatgtgatgattcaaaaaaaggcactctatgttctcatatagcagatatctcattaaatagttttatttgttgcttcaagaattttaaatcatagttacattgaagttcttgatgaagataatatgttttaaggccatatattactatataaagtaataaagtttattacttaaagttctatacttttttatatagtattataatagtattatatagtaatatatggtatataaataaataagtatagagcttatagaacaaagtaattcttatgctatatgtttatattttgaatgcttgattcagaacttgacccatactttgaaaaattaagaaatatatttttaagaaatatgattatcttaaattcacatttctgtattgtgactattttttaaaataacgaactcgatagatcctgctgtgtagctaaagtgctgggttggaaaggatgtctcatctttttacttacaaatgtcagaattagtgtgggtgattgtagtaatcattgaaaatcttatgtaaaagaagccatcattttctattgaaataaataagtaacatgggtatcattttggtatgttttttcagccatgactaatcatagctaatttataaatttatatcattttaatcatttcagtactagagtgaagaatatgttttgtaaaggttaaacataagaaaattagtaaagttgataagtgtatttatctaaatgtattacttttaattgtagtatattagtaattttagtaattatagtatattaatggacttatttaattacttattacccctaacagagtaattatagtaagtataacagaaaaaattgaaagtaatgaccagcaacactagttgctctgtaaaaaattgcctatattaagcattttaattctcacaaaaatcttgtgagataagttcattattgtaccacgtatacatgaggacagtattaataagtaacttatcaaagatgatattgcttacattttaatataattgggatgtgatcacagccctcaatatatatcagatataagtatataatatgtgatatacctgcatgttttaaaatccgacatatgtttgtatttattttatacatacatgctcttctaatattttctatatgtacatacatttttggcaaatataaacatacacatatacacttaaaaacaaagagaagataatttttatattttacatattttacaaaaatatatttgtcactctatgattgaaggtagaatgcaacagatacaagctttaagttaaattgcaaataaaccacaacttattgttattcaccaatctaacaattagcttgttgaataatttaaaattatagttggccataacaatgctagctagtcttaaataaatggcttgaaaacatacatggttccagatattacaataggaaatctggtgctacatttcatagatcatccagtagaggattcaaactgctgtctttttcgttgttgttctctaagaagactggcaaacgaactgcatatcagggcctaaaactgaaatttcttgttcatatttcaattccttgtattaaattacataataaggataattgttagtgatagctaggagaatgcaacagatatttcttgttctttaaatacttcataaacacacatgtttctattactttttttctattttggagtttacatttgctattaatgctttactttctgttgagatctcttaaaaagtaaattcaatggaacaatttctgggacatacatatgctactaaagttcactgaatatctgaatctactaataactagggataaaactgaaaacatgttatcagagaataaatgtgaaaatgcaagccctacattttaatacttcattctttccaactttcaagtcatggctaaatcttatttaatataaattgatacagagcaaagaaaatcaattaagtgttacattttactttatgaaaagacaaaactttgatatcaaatattatcatttaccataaaattaaatatagactacttaaccaaatattaaaaaacaaagaatatcacacacaatagagtttatgatagtaatataaatatgatggggttattaatatattaatatgttataatatgagtgaatttgatgatatatttatatattgcccacattcttagaaaattaggacgaaaataaattcttcaaaggtaaaatgtaattatataaagcaagcagcttacatcacatttaatataaaaatgatagaatggcctctcccaataagtttttgtggaatgcaatttgtccaaaaaattaataaattatcacaaataaattatcaattacatactaatactgattttattttattttccttttttcaaaataaacgataaacttttttgataaacttctccatgataaatatgcagggcctaaaactaaaattacttctttatctctattctgtttctaatttctgtttttaactacataatttatcgaagtttgttagagaaattccaaatgaatagagcaacagtggaaattgcatgggtgaagtgagacagacatcccccatgtattactccaaaacagtaaatatccctgactgtgcccccaaaataaaggaacttcataaccctagactcccaacaaacttgtgtgttttaacttagagttttcacaaaaagtaattaattataaggaaataattcataggcttctatctgaacttcaaaaataataatttaacataaacataatattttaaaatatatatctcatgattatataataacatattcttccattaacaccctcctttagagttgttatgagcttgtttgtttcctctgtaacaaaagttccatccctgctcctgggataaccagagaaacacatgttttggagaaccaaagctacctatttgaaagacaaatgcatagcacaacaccaggcgaggacacaggctgcattgcaggttctaacagctcaccccaccaagctcggtggggcagttcacaagccgccatggcactgctggtgccttgcattggcatacatttgcctctctcccgtggcttatgttcacatcctgctccttaactgtgctcatgatggatattgctcaatacttccgggactgagtgtactcctgattttagtactttttgaaataattcacttagtgtcaataaaatataactttactttgtaatatttatattatagaaaaaagtacaggtgaaactacatgatttagtgaaaatgatataacttagaagcaattgaaaaactttattattctagcaatataaattttttaaaaagctccctgttttatattctagaaaatgcagtttcctagagtgtttttaatctggattttgaagggcattggtgacaatgaatgcctatatctattaggattcaaactattatttgttctaattaacctgaggtttcctgtcatatggtgtgctttctcagaggaaaaaaatttgtacattgtcttctggaagagaaatgtgctcaaaagtatcgtattttcccaagcaaacattaagaaaagtcttaacaataattacagggaatggtaaacacaactacatggatagtgctgtcaaagtcacaaattcattcattaataagtactctggaagttacattgctcctgtaagaaagcaaaacaagattttattaaaaattagaaaactttggttaaagaaaagagaagcatcatttttttctcatcaaaatataactaaattctttgagtttgacaattgtaaagtattctgtaaagttttgtaggttttatgttatttagatataatatctgaatataattttaattgtttatacattatttaaaccttaaaaacaatgtcaatgtaaacattattcatggatcacagaactaaaagagctcaatcttgttggaaaactcacttattttcagttgttggcttatctttatatcactttttacaaataaataagttttagtatgatccattattaattttttcaagatcttttcttaattgtctgactgatttgaaaagaagatacccataaattagcattgcctgcttgatgaaacataagagtgatcttaaatgttgcttaaggtactgatgtaatttccagactttttcaagataaccagatgtatttgtacaaaaggataataaatctctccactttcattactgagaaagagattgctgaagctggtctagtatgttagctgatttcgcatagttaaatggtggaataattttattactatgtcaccttttcctagaaaggtgtatcattgtattttaaagctcaagtaacattcagattgtaaaaagggttacttgtcttccaaaataatgaaagcgtaaattctgtttttcagcatggaaaaaagtttaatattaggcagcaggcatctgttaaacaaaatgtacttttatgcaattttacaaatgtgctaggcaggacaaaaataaaattagtatgtcagaactgttcatgttacctttctgccactaacataggcagaatacctacgaaggtatatttaatgttgaaccaacaattactctcttgactttcttatgcaattcccacttctatggaaaaacctttcctccttcatattgacttttgattttctccttttatcgcctgctactctttaaaaatgctagccactgcaaaaacatgccaaattgtaaagaccatcgatgctaggaagaaactgcatcaactaacgagcaaaataaccagctaacatcataatgaaaggatcaaattcacacataacattattaaccttaaatgtaaatgggctaaatgctccaattaaaagacacagactgacaaattggatagtcaagacacatcagtgtgctgtattcaggagacccatctcacgtgcagagacacacataggctcaaaataaagggatggaggaagatctaccaagcaaatggaaaacaaacaaacaaaaaaagcagggattgcaatcctagtctctgataaaacagactttaaaccaacaaagatcagaagagacaaagaaggccattacacaatggtaaagagatcaattcaaaaagaagagctaactatcctaaatatatatgcacccaatacaggagcacccagattcataaagcaagtccttagagacctacaaagacacttaaactcccacacaataataatgagaggctttaacaccccactgtcaaagacagatcaacaagacagaaagttaacaaggatatccaggaattgaactcagctctgtaccaagcggacctaataggcatctacagaactctccaccccaaatcaacagaatatacattcctctcagcacgacaccgcacttattccaaaatcgaccacatagttggaagtaaagcactcctcagcaaatgtaaaagaacagaaattataacaaactgtctctcagagcagagtgcaatcaaactggaactcaggattaagaaactcactcaaaaccgctcaactacatggaaactgaacaacctgctcctgaatgactactgggtacataatgaaatgaaggcagaaataaagatgttctttgaaaccaatgagaacaaagacacaacataccagaatctctgggacacatttaaagcagtgtgtagagggaaatttatagcactaaatgcccataagaaaaagcaggaaagatctaaaattgacaccctaacatcacaattaaaagaactagagaagcaagagcgaacatattcaaaagcttagcagaaggcaagaaataactaagatcagagcagaactgaaggagatagagacacaaaaaacccttcaaaaaatcaatgaatccaggactggttttttgaaaagatcaacaaaattgatagaccactagcaagactaataaagaagaagatagaagaatcaaatagacacaataaaaaatgataaaggggataccaccaccgatcccacagaaatacaaactaccatcagagaatactataaacacctctatgcaaataaactagaaaatctagaagaaatggataagttcctggacacatacaccctcccaagactaaaccaggaaaacattgaatccctgaatagaccaacaacaggttctgaaattgaggcaataattaatagcctaccaatcaaaaaagtccaggaccagacggattcacagccgaattctaccagaggtacaaagaggaggtggtaccattccttctgaaactattccaatcaatagaaaaagagggaatcttccctaattcattttatgaggccaatatcatcctgataccagagcctggcagagacacaactaaaaagagaattttagaccaatatccctgatgaacatcgatgcaaaaaccctcaataaaatactggcaaactgaatccagcagcacatcaaaaagcttatccaccacgatcaagttggcttcatccctgggatgcaaggctggttcaacatatgcaaacataatccatcatataaacagaaccaaagacaaaaaccacatgattatctcaatagatgcagaaaaggccttcgacaaaattcaacaacccttcatgctaaaaactcccaataaactaggtattgatgggatgtatttcaaaataataacagctatttatgacaaacccacagccaatatcatactgaatgggcaacaacaggaagcattccctttgaaaactggcacaagacagagatgccctctctcaccactcctattcaacgtagtgttggaagtgctggccagggcaatcaggcaagagaaagaaataaagtgtattcagttaggaaaagaggaagtcaaattgtccctatttgcagatgacatgatcgtgtatttagaaaaccccatcatctcacccaaaatctccttaagctgataagcaacttcagcaaagtctcaggatacaaaatcaatgtgcaaaaatcacaagcattcctatacaccaataacagacagagagccaaatcatgaatgaactcccattcacaattgtttcgaagagattaaaatacctagcaatccaacttacaagggatgtgaaggacctcttcaaggagaactacataccactgctcaatgaaaaaaaagaggacacaaacaaatggaagaacattccatgctcatggataggaagaatcagtatcgtgaaaatggccatactgcccaaggtaatttacagattcaatgccatccccatcaagctaccaatgactttcttcacagaattggaaaaaactactttaaagttcatatggaaccaaaaaagagccctcattgccaagacaatcttaaactaaaagaacaaagctggaggcatcacgctacctgacttccagctatactacaaggctacagtaaccaaaacagcatagtactgttaccaaaacagagatatagaccaatggaacagaatagagccctcagaaataacaccacacatttacaaccatctgatctttgacaaacctgacaaaaacaagcaatggggaaaggattccctatttaacaaatggtgctgggaaaactggctagccatatgtagaaagctgaaactggaacccttccttacaccttatacaaaaattaattcaagatggattaaagacttaaatgttggacctaaaaccataaaaaccctagaagaaaacctaggcaataccattcaggacataggcatgggcaaggacttcttgaccaaaacactgaaagcaatggcaacaaaagcctaaattgacaaatgggatcttattaaactaaagagcttctgcacggcaaaagaaactaccatcggagtgaacaggcaacctacagaatgggagaaaatttttacaatctacccatctgacaaagggctaatatccagaatctacaaagatcttaaacaaatgtatgagaaaaaatcaaacaaccccatcaaaaagtgggcaaaggatacgaacagacacttctcaaaagaagacatttatgcagccaacagacacatgaaaaagtgctcatcatcactggtcatcagagaaatgcaaatcaaaaccacaatgagataccatctcacactggttagaatggtgatcattaaaaagtcaggaaacaataggtgctggagtggatgtggagaaataggaatgcttttacactgttagtgtgactgtaaactagttcaaccattgtggaagacagtgtggcaattccttaaggatctagaactagaagtaccatttgacccagccaccccattactgggtatatacccaaaagattataaatcatgctgctataaagacacatgtacacatatgtttattgcagcactattcccaatagcaaagacttggaaccaacccaaatgtccatcaatgatagactggattaagaaaatgtggcacatatacaccatggaatactatgcagccataaaaaaggatgagttcatgtcctctgtaaggacatgaatgaagctagaaaccataattctgagaaaactatcacaaggacagaaaaccaaacaccacatgttctcactcataggtgggaaatgaacaatgagaacacttagacacagggtggggaacatcacacaccggggcctcttcatggggtggggagagggggagggatagcattaggagatataccaaatgtatacgacgagttaacaggtgcagcacaccaacacggcacaagtatacatatgtaacaaacctgcacgttgtgcacatgtaccctagaatttatagtataatatttaaaaaaaagaattgttttaaaagagtaaaaaaaaaaaatgcttgtgaaaagtgtgccagcctattatctaagcaggcaggtagcactaattctctgggaaggaggtagttgagtgaaaagatgtaggtttctgcttctttgatgtatagttagctgatgttcaaccaagggtttttgtgggtgtgtgtttcattttgaactaaaaatcatcattttacaagtatatccaatttcccttgatattgaaaagtgagatgagaaaatggatcaaaatgaaataataaacaaaatcacaaatgggaaatgaaaatttaaacgtgaagtatttcatcttttaattccttggctatgtggctaacggggactttgtgttccccgcagtctcaaagattgtacacgtctttgatattatgctaaataaatatccccaggtaatcagcatatgaaatactatttctgttagattataaattttagcacttttatataagaggtacttgatattttagtcaatggccagctcactgagcaatattcctttcactctctcatcatgttttaagctgttattgtctagcttaggcaatcaataattgatctcaataattcggctatctacttagtcatagagcagcaatctgaagtgaggatatatttctactgaaactcttgactatggcccatggggcagtgattttaatgtcagttccatgcttgatgaaacaagtgctctttggtgagctgaactcttttaatgagattatttgtaagtataatggggagtgtggaaacgtgccaattgaggagtcaatggaagaggaataataagaataatgagagagaaacaggtaaagccaaggaaactgggcatattgagaactctgcaaaatcaagtgagtgaattatggctgtgagaggacgtctaatggtaattattgatgtgttttataccccagagtgtgaaagtcactttatgcattctctttttgataattaagagtaatttataggctttccacctttcctgtttccagtggcaagcctccagatgccttctggactagcacactgcagtgtgaagtggcaacgaaacaagccctcaataagagtgctcaaattcctaagttatttctatcaaatacatgtgttgttaagtaattgttatattttggttttatttagcatattctttttagtagggatattaaactgtatttgatgatagtttgtgtttatgcattttcttcatgggaacataaagaatctaactttgacagaactggagaataaatatctgtaataataatttaatgatatctgcacttgtatttctatttcctgagggtttaggcagatagatctttgagaaacatatagtgcagatcttttcagcatttgtatctcttatagatgatcgttttattattgctgtggttgtcaaactaattattttcccacatccacaactcaaaatatggcatgttttaagatgatgataattagtatagttttacatttttacagtggacaaaggaggaaattgaatgaaggaggaaattagagtgacgtaacaaataagactaaaacctgttgtttactgctattaaaaacatggaaaatgtatctagagtaggaaagcaatgccaatataaaggtaggttctgttgctgtttgcttatttttaaatttctctgcatagttgattagtgtcaatggggtcaaatatgaagttaaatactatttctaatgttacatttgaatattagatgaatgggttaatcttcatgaactttagttaccatttctttgaagtgaagattcttacctatttcatagatttttcacatgcacgtaatatgagatgctcactatttgatttccatccctctccatacacttgtttctccgtttctctgcctcttctctgacccatcacattccctataataacaacttgacaaatgtcatcagtcttacctatgccccatgttttcattgatctcgatgctcaattttacccacatatcactgtcaacatttaaaacagcacatcgtaaaggcagaagccaacacacacatgtacattttcccacgtctttaataggtaaaatgtgtgatatagtttgtatgtgtgtccctgccccaatttcatattgaaatataatccccaacgttggtgggaggtgattggattatgggggcagattgctcatgaatgtgttagcaccatctcatgtagtactgctctggcaatagtgagtgagttgtcctgaaatctgaatgatctcctcccttgctcttccatgctcctgcttttgccatatgatatgcaagctcacactttgctttccaccgtgactggaagcctcctgaggcctccccaaaagccaaacagatgttgcaatgcttcctgtacagcctgcagaactgtgatccaattaaacctattttcattatgaatttccaagtcccaggtattttttatagccaatgtgaaaacagactaataaaacatgtttaacttatggtgaataaagaacacctaatatcttgttacaaggcaggaaggagaatgtagaatctgtggggtctatctcactctagaattcacaagaataatcttggtgtcagatgagtccccatttctaaatgactctggtattttacttcctagagcactgtacttacacttttgttgtcatttgatcaatataaaggcaaaacttcacatttttagctatagttttcatttgcaagaatattacataaaatcagactttagtctcttcagtcagtaaatacaaattgaaatctatggacacctgggaaaactacagatatatttaaggaatttaaagaaatgtttcccttcaaagtgtctctgtgttactcatatttaagatacacttctctaatttgttgctttggaaaaatcccattaaatacacactaaagttttataataagatttgataatttatatatatatatatatagcaccttaataaagttggttcatcctgtttattgagatcaaagtcatatgcaatttattccctcatttctgtcttccagtagtccaccctgtaaaagaatgtgtatacatatctgtttatttttaaaatggcaccaacagagaatcattttctttcaagataatggtcaaatagcacattggtgttttagcactacaatctaagtggttttttaataaataaaattaattacatgggtgctacacatgacattcctatacacaggttttccatatttaacaatcaatttaacatgtttttactatatattaaatatgttaagccctatacaatgacttatattataaattaaaacattgagtttaactgagcttttgaaatcatacgaaatactcttgagaatgctgattataactttctaatttatccacaatacatttaatttttgtaagtactggaaatctgcatataataactgtaagtcaaaggaatatagcatattatgaagtctggctaatttatcataggcagttatatcaagaacatcagatcatttcattcttaccaatacagaatgaacattttttgtaaatgcattatgctttcttccacattatttttcggaagagccacagtgagcttaaatctttaaaaaaaatgccatgtcgcaaaaggaagaggaagatttgaactgtgtcagctatactataaaaacccttttgatcagatagtctctcaatttttgtaaattcaacattctgagctttaattaacagaaaatatgacatcctaatactgaaaacgttttatcatgttgaaaatgcccttgaagacttaaaaaaatgactttggaattcttacatattttcagagaaataaagctgttaaagcaactatatctggttatttggcatgttgtctcaaattggaaacaactttccaatttaataaatcatttttcaaaattccacataaaatctattatctgaattgcaggagaaaataaaaatgtatttaaaaataagagtaggcaccatagcaatgactggatatgataatgagaccatgagaataatttgtcgtgaagtgtcaccaaccaccttcaggttcctattgattcctttttaccattgactctaggtaaacgtgggaggacagtctctacacatggaaaatgccagtgtgggtggataactgctttacgattgtgcagatcattgaaatctaacatcaaaactgtttctgtttttgttcttttccttcatttattcagataattcaatgtattcaaaaataatattttcctgagcaccaagatagatgtttatcatatgatcaagaaaataaggcagaattcctatatgtgtgtgtgtatatatatatatatatatatatatatatatagcatcttgttgcctatagtccatagagtaaaataaataattttttgagtttgttataatagtaataataatataattttgtatgagaattcgagaattttacaaacagagaaaatttaatttcttactttggtacacattcaatgttaaaaataagtgtttaatatcagtatgattaacttcaaacttttgttgatgaagataatttaatgatttacaaatttatttttgatagtctgtgaacttatttctattatatttctgcttttgattttcacagacaagttggttacttagctttaggctaacatttaacctaaacattattattatggatggtctagaaagacttttttcattacaaagaaaagaaatgagaaatttagattatcttcaagtacccttgataataaaaaattatatttgctccaattttttaattttgaagcacttattatttgaaacttcagcaaagttcagagcagattgtgacaaaagtctattttcataaaaacttgctatttgcttttttgatggtgttttccaactattaaaaactgtacaaataaataattattatttaaaaagaaatttaacctccacatccacatcttcatacacacacacatacacacacacatatataatacttatatacacatacatacatgcacatgaattcaaaacacagacttttaatatgattgaataattttatagacatacagtatcaacactaaccaataataaagcctgttttttattccttatacagtatgtatctaaaaactagaatgaaaactgcgtatttagtgaagtaattctatcattagccatagcccacgtggatgactcagtgcggtaaagatcaataacagatggccaattatagcccaagcaaaacagttaaactctcccagcagagcttttggcttagccaatgtataaactgtcttagtttctttggaataaaaatttactcaatacaattttacaggtgtgtagaaagtggatttcccaagagtactatatttgcctggtcaaattcagagcaaagaaaaatggtatagatttaggaattctgcatatgttgttctaatcacctttatttcaattataaacccagggtttggtaaatttattcatttggtgaatcatcagtaaaaacaaaaaatcaaacaaaaattcctggtcaaattttgcagctctgtgagaacttctctctgaggttctatatgaaagcaagagaaggaaattattgagatcaattttatgaagttgtgtttttttcctaagcaatattatttaaatgtaagaacattgctccctagagcattctaggagccagtcataagtattagagagcagagtcatgggctaatcataagtatagtggggttcaaataagaatcaagaataaatatataagcgaagttattaaggtaagggagattatttgggtcataaagaaaatccaacaattaaattatgaaacgtttaaaatttaagaataactgatacaatattcagtagtcttctctctgaaagtataacatttaatgtagatataattcatgatagatataattcatgtagacgtaattcatgataaatgtagatttaattcattatatcatgtagatataattcatgataaatgttggcacccaatatttaatttatattttattatatttaatttatatttttactgttacttttttgtcttaagatttatattgacagctagaaagtataatggtatactcatctcattttatataacagtttcagaaacagatgaaaaagttcagataagctgatttatataaacatctaggagatgtacatggattttaattttttatatgttagcaaaacaatcaatatttttatttagtttctattctaataaaataccatagacaaatatgtaggtttctattagtttttatgttgggaagagaattagagccaccatcaagagagattttcctgcttaattttcctgaatggatatgcgtaaaaacactgattgacacgagtctattcaaatcacaaatggaattttaagatctcactcacagacacatttctggccccaacatgactgctgttcttcagtagccattcagagtttatcaaaccatacatatagatcaaggagagaaggaccctttgctcaggagaaattccaatgtatcttgtcttctgtgatacttcactttatctcattatattaaaaaatatggttcatggggaacatgtgtagatttctgatgatctcactacagaatctgtggtgctatagtttacagtcttccctatatatttactgggaaggcagtcaccttctgtttgagttagtacctcaacactaagcagatgcaaatatgtggattatttaaagatttaatatcaatcaataataattaatacatagtttacaaagaataacttaataatatgtcaataataaataacataatgtaaacacatacacatacatgtggcacacacacattctccattctacagtccatatctggattctagattctgaagaaaagaaatccatttgtgtgaagcagggtaactgtgcagtacagtcattactactgcaactcactgcttctgaggctgcagttttactacttgcctgaatccagtgagacagaacacttaaacgcactacgatttacatgatgtgggttctttacttacagagagacagcaaggagcaacagaagcctaggattcatcaggagccagtcccacaggatcaggaaagcttctggggcaggtggagtctcatgtgcatgtgctccacttgcaccaaagctgaaggaccctggaaagtatcccgtggtaggttttttttttttagacagagtctcactctgtcgcccaggctggagtgtagtggtgcaatctcggctcactgcaacgtccgcctcccaggttcaagcgaggattgaacctgcctcagcctcccgagtagctgggattacagatgcccgccaccacgcccagctaaattttgtattttctttttttagtagagacactatgttggctaggctggtcttgaactcctgacctcaagtgatccacctgcctcagcctcccaaagtgctgggattacaggcccagccccatgctgggttttacaacctggggttgtatgatgaatcgaattaaagcaatgaaggacattctttctaggagggactggaacagagcctgaggctattccagtcacttcctccttatttcagtatgttgtactctagcatattttacagtcattcttgaaaactacaagcaagaaagtgggaagaactaggttggtccaaggccacccagtgaactgatctgcaatttgatatttagactacatatggtatatggtatactcattatgtctgtgtttgaatagatattcttagttgtcagcatgacctttgcaataacctgaactttccagtgatcttggtaatattttcacactgtgtttggaaagaattcaagagacttgggatcgactcctggtttaggcattttctgtacggaaatagacaaatcacctgttttctttgggtatcaggtgtttttattttcattattagacaaaacagaaaaaaatgatatgaaataaaagagctcagacaaaaactaatggcagaattagtgtgcctatgcttacacataatggtgtctgaaagtactcgtggataaaacaagcaaactggtagtgacagagggtagtgagttctattatgaaacttaattaaccaattaaattcttatattccttaataattcctacaaagttacctatagtgaaggtcaaaaatattcctacatagttttaagatatacatacatatatatgtataaatacatatgtacacacttatacatatatcttataacaaagcataatgaatatatatgcatgcatacctatttcagtccaaattatttggctataagaaaagtaggcagaagcagttactaagaaacatgagccatttgaaggggtcttgaggagtgtatcagacacatcctatgaagttcttaattctcttagattcagagaacctaagatcaaagaacctttggtcactggttccaactccagtcaacactgtatagcaaacagttttacgtggactctgtccaactttctgcaggtctagattgacagcagactttttctcatactcatactgcacattctttgccttatttttgggatctccctgtcaaggctgagatgttaaacatggggaccactgagcaccatgcattcacaacccagcagtgcagaggaattaatgtaccgtgaggcaaacctttgtataaacagaaaaaagactcaggaaagaaacctctctatcccctttgggttgattgtctcaggcaacagttatatagcagcttacaagacagctctgaaagcagtcagagtgatttcatatcatgcaatggctgattaaaaacatagtaccggctgggcatggtggctcacacctgtaatcccagcactttaggaggccgaggcgggcagatcacgaggtcaggagatcgagatcatcctggctaacatggtgaaacccaatctccactaaaaaatacaaaaaattatccgggcatggtggcaggcacctgtagtcccagctattcgggaggctgaggcaggagaatgccgtctcaaaaaacaacaacaacaacaaaaaacttagtaccaatatgttgactgtttttctttccttccctgtctcccctttcccctcactcaggccaggattgcattcccttatacagtgctagtacatatacctttcctcaggctctcctctctggggaaatcaagctaagacaactgatgttagacatgaccctagaaagcagaactcaggataacagtacgggtctgaattactcatagttctgacagcagtcaaggactccattactgatggtagatatggtgggtataatcactggaaaggaatagaaccaaaactgttaatagtaatttggctgacatacaggatggaatctaaatccattaaggcattctcaacagccactacctccaatatctgggtatcaaatgccatttcatggtatattatgagtagcttccattcaattttttagacactgcaatatcaggacagaatcaaattataatactgtaagactgtatgatatgattaagtgtgcaatttcaaaaactcacatttgtcagtgtgagtttttagaagagtagagacctaaaatctgtgatggggaatatgattggataaatctgaaaaatttgaattctcaatttcactaaatgtattgtttcagcagaagctgccccttattcctttgttagagaaaataagcctcttcttgaatggtgaccttgaaatgacctcacttgaatcagacatttaataagatggagcttattttcataaaagaacttttcctgcctttcctcattgcttctaggataattgtattaggcggggttctttagagggacaggactaataggagtataaatgaaagggagtttattaaggagtattgactcacatatcagaacgtgaagtcccacagtaggccatctgcaaactgaggagcaaggaagtcagtctgagttccaaaacctcaaaagtaggaaaacccacagtgcaggcttcagtctgtggctgaaagcctgagcgccccgggcgaaccactggtgtagatccaagagtccaaaagctgaagaacttggagtccagtgtttgagggcaggaagcatccagcacgggagaaagatggaggtcagaagactcagccagtctgctctttccattcctgcttttatgctggcagctgattagatggtgcccacccagattgaaggtggggctgcctctccgagtccacacactcaaatgtcaatctcctttggcgacaacctcacagacacacccaggaataatactttgcatccaccaatccaatcaacactcaatattaaccatcgcagtgtgtaaggacagaattaagcacaaaccaaaaagggaagtacaatccctcttctagaaggatatagattgcgcattacaggaactacagaaactagctaatttttactggtagaagctattggacaatatgtaagcattgatattgagtatattcatcaaaagggtataaaataaggctaacagtagataatctcatgattttggagtgaggcataaccatgataagattcctaggatatcctaacaacctattaggatggctagtagaatcttgctctcatttatagcaaattaagaataaaggtgcttatttcattgacacagcaatgagaatgaaatcagaaggctctcagaatatagaataaaaaaatagaattaatccttaagagctaagaacccaccatgagtcttcttcctcagaatagcctaaataattttctgtttaatataaagcagtaaggaatgcattgatagggggtgctatgatcctaatgaggactatgtttcctgccaggaaaaaccaaatggctgcatgactgggattgtccgttttttaggtctgttttattatgtttattttggcataatagaatggatggatctattgtgaaatttgcatgacacagtagaaagatttctttcaagaatatcagacaacatgcttaagctgcatgaacaagtgaccctgatgtctatgtcccctatctcttagtacaaatgacctatcttcatctcatggttatggtttcatggggttcccaactgacggagtaggataaacctcagcctgactcacagatggattattgcaatatgtttgtgacaggtgaaagaggattgctgcctcattgcaactccagaaatgagtggtattaaagtacagttataaggggcatcattccaatgggcaaagctgtgtgcagttacttagctgtcacttcctatgagagagaagtagacatagatatatgggtatacctggactctacggcagaagtaaagtgtttggtccgttagtctggacctggaaagacaagagaagaaaattgaaaagtaacaattcatagctcaaaggaaagacccgtgggagtgggcacaaagcatgtcaatatgtggatctttatttttcatgtcaatgcctgcaacaatgacaaatactgtaactttcagtgagcctttcttcttagcccacccatgtttgggcaatagcccagggacagtaagatcattgtgaaagatggagtcaatgcataatatatgtattagcacctgtgagctgatctagctaactgctacagctgaatggacatgctgcctttggcagagaccaatggtgtgcctcagtatggcatcatttctcagaaagcttggtcataagcttagctttacatcgcttgtttcaaacactttcccctgataagaaagaggcagtaattcatactcactaaaacctttacttactctggatatgagcttaccttaccatctcacagtccctctgtcaacaccactccaaaatgcttgataattaaactgtcttcttattagttctccctccttcccttctaccttgctctctgctttcagctcaggtgtttaggattgcactctctaatgaaatggcaacacaaaaacttttaacctcaggctctgtgtgctgggggacttggattaaaacagaaagtatttgacaactttaatcattcttagcaatcatataaaaattctttattttaggtcaccatcttctctttcaaattatggtggcaatcctctgtagtctttactttgcattcaaattcaccttcctataactgaaatgtgatagttatcttacatacaaatttaaaatgattattttaagtaataacgatcttactgttcattattgcaggataaaatcccagcttcatagcacagcatacatggccttccgtccttcagaaaaagttcagattaacctcataggctgtttatcccccatcagtgactctgacgcttacttgccggtttagaatttttcagatattctactttctttgcctaaacaaagccctttatactcatgatttctgggtacctacctcatgacactcataacttatcctagatagaatatcctaaaatttttgagaatgatcagggccaagttacatgtacctcatctgttcttccatcacacatggacatttcctaatcacaagatttagcacacgtaattttattgagtttttttgcctattatgaaaaaggtggagagaaaccataagaatgcattatttttgttgcatgattttatttttgtcttttttttttttgcttaatttgataaatcttgtcgttgagggaagaaaatatcttttaagggtggggacttaatattttttctgaagagcttatatattttaaagtaccacatttctgacatgtaaacatcagagctgcatagaacttattttctcacatttgaaaagggatagccctcttaagaggtaccatattaatttgtattgattattcacttttttcataaattagtttacagaatttttctaagcataattggagtatacatggaacagaagagaagagcatgacgtgctggaaaaacttagtaacaggagatgacaaggagagattataaattagagaaaacacaggagattgaggagacaaacactatctcacagatacatcaagacagaccctagaattagagtaaatgtcaagatgtttgttaaattagtttacaaaatgaaactcaatgatattatgttaactacttactggttttggaaaaacaattcatatgtatacacagagagagaaagaaatgaggtgtgggggtgtgtatgcgtaatagacacggaaggatttgcaaagagaaactgtaaaaagagcgtgcattgcctctcctgacggctagacctgaagaccaaattctctttccattccattttatgtcacagatttgtttatggcaggaaaacaagtttctttttttgaagtattttctgaaacatactagcaaagactcacagatcatatggaccaatcagaggtcactatcaaggagaagaaaattaacaaggaacattgctagaaacatttacactgtagcctgtaaaacaacaataacaataaaacaaaaggaaaagaaacaaacacaaatgcaaaaccaaaggaaaagcaaaccaagaagtcagtttgagcaatcccattccttccctcagaaaataaaataatgacatcaacatctcaacaaaaacaacaatagtagtggtagttgtagtaacagcagtagaacgactaatagtttcataatattcataataacagaatgtaatagtaacagtaaataacttatatgtgcagaatttaacaatatttttatatatttaagcatattagttatctgtggaagagaatcttacctcaagttatatgtcaaatactgccaaaatgtaagggctcagatatgtgcataaaactgataacagacccacgagggtttatgccaagtcataagtaaagagttaagagaagttgaaggtctctcttcagactgtggataacatttctttctgatctacagcagccactcatttggttactgagtgaaaaaaaaaatgcaatgattatttctgctgaagacatgtattatggaaattaagtatcacaaattattttacattatatattagtggataagcccaagaaataaaaagtcttacaaattatcaagtcagatgctttgagaatcatttatatccatacaatgagtagctagtgctacaagttttttttaaaacgaacaaataatagggttaagtggagcatttggctctctattaagaagagtctgcatcatattagatatcttaatctgtcataaattgcttcctgtaccaaagtttccagaaattttaaacattggtcagtcaaaaaattacaaataaaagtaactagcaaatgtattcagcagcttcttccacatgattttaaagttaaatacataaaccaagaaaaagcacaccgagattttcactttatcactaaattagaagaaattttgctaacttccttattctccttcttatgacttaaaatttttttcatgaaaaatattgataacacagaacatctagacctctgtggggcttgatgattgtcagaaataactttactctttgtgtcacaattataaactatatgcagacatttcattccatgagaattttaatctttttaatttataaaaatattaataatcactacttttttgtctttttttatttgtataaagttagggggtacaaatgaagttctggcacatggatacattatgcagtcttgtagtctgggtcttttgactaaactattaataactaatggtgaatattacaaatattagatactgttatacaattgaaactgcatcaccgtagatatagcaaaacagaaaaggattggaataaacacaaaataatacaatgctctaaaagatgagatcattgacccctattcatttaaatttatgtgcacaaatattactgttttgatataaaataattttcaaaagcaataactaattcactgaacaaataaggatggaaacttgctagtttctgcatgtgcttaccttccagatgtgcttgctcttcatgttatgtttgttatcagtatatgtttattaaattgagctataatatgccttagatataattatattttagtagcatgagtcattagcaaaacttacattatcataattttgaatatatatatatttctagactattatagtaaatatatgtttcaatgtatatatatatatacacatttagtcaaatatatggatagacacataaaaatgcatacattcttactgaaacaaaaaatcacacatacattgttatacttaatcaagaacaagaaatttgctttttaatttcatgttacaaattttatgactttataattgacagagatgatcaaaagctgtcatctatccaaacaatatttgtgatctgaaattaaaaaaaaaaaatctgtaggaattattccttctggaaaagaaatatcacttatagtctcagaagtcattaaaaagttcttggcaatgaagtttaatataagagtaccttgaataaggacttaattttaagtagaaaagctcacaaatatattaaaagattatgaggttctcactggagcaaaataatatgagaatagaaaattttgttcctctttattaataagcttttttgtaaccacctggcatttggcagtcagttcttgaaacaaatcagtatcacttacagaaaacataaacaatggaatttaatcaagattaattgtgagtttgtgtttcactccagaaatactataatagtcaaaagtacgaataaagctattcctctctttttatggcagtaaaatagaaagagatgaatgctttaagtgtaattctgcctgtggtttcagtagttttggacaggaaatcagtcgtcaatctagtttagaaacttttgtgcatatatatatatgtggacagatgatagatagatgcctttatatacatttaaatatgtaaatgtgttacgtaatacttaatctagaataagaaatttgctaatgttgaatagtttcttcagtttaaaataaaactgacttttatatatgagaacaattaaatcatattgaaaaatggtgtttgggattacagataattttggaactcagtatataatagaaattagctttgtcatgagtaagaatattaataaatgttcaaatatctctaagtatcaaattagttcaagtgattaagattgacgaaactacatgctaacctccagcagtagggctgcgcttctgatttgaataacagaataaatgacagtattagtttcatattactttgcaacaaattaccacaaactagtgaattaaaatgatagttatctattatcttgcagtttctgtaggtcatagaacccatatggttgagttctctattcagaacctcactgtcctgaagtcaacatgttggccaggtctgtggtctcatgtgagcattaggttcttctttcatgcccactcaatttgttggcagagttgagtttcttgtggttgtagcaaggaagtacatattttcttgctggctgtaagcctagggttggtctcagctactaaaagccacttttggggtctcccttttcacaagctgttcataacttaattgttgacattctttctgggcagtagagagcatctgctgctgcttcctctttctttaaaaagtgcacgtgatcaggtcaagcccaccccaaacaatttcccttttagttaactcaagtaaattgattacagaccttaactactatgtaaaatgtattttgccattgtatcagtttgcttgggatgctgtaagagaatcccatagacagggtaacttaaaaaacaaatatttatttttacagttcaaaaggtagaggagtccaagattaatgggccagcaaattaggaacttggtgaaggctatttttccggcttcttgctgtagtctgacgtggcagagagtgagagagctctagcctccccctcttcttataagaacattattcgcacattgggggccctgtactcatgacctcatctaaacttaatcatcccccaaagctccacttccaaatatcatcacattgggggttacagcttcaaaatatgaatgttggaagggacacaaatatttagtccataacatccatgcagcagattataattatgagagtgatatctcattatattcacaggcactctctgcattcaaaggaaaggggtattacactgcatatgtacatctggggacagaaattctggaggtaattgtggaattaggcataagaaattagctttttactttgtcaattaccagttaagtcaacatcaaagctgagtcaatcaagggatccaagccaaaaattcaaaaagcagaaaacaagtagataaatggaatatagagatagagaagggagaaaagagtgagagaaaaaagagaaataagaagtggaaagaaagagaaataaatataaaagtgaaacaaaaaatataattatgattgaggtaataaccaggataaaggcactggacagaatactctagtgtgaccatctatgttgtaattttatacttatcaacatgattcaaaatatttaatagtctgaacaaaaagacctatactattttcttgtttgttgtaattattgaaaagtttataatcagatatttccttattttactaaaaaataacacactggctcactgttgttgtcagtaataacatcaccaccaccacaatcttttccctctacacctttttatcttctacctccttctcctcctcacctcattcctcttttctttatattctttctcctcctccttatcctccctcctcttcttcccttttccacttctccttcctttcctcttttttcctccttctttgtcctttttcttcttgtctgtcattatcatcagcagtatatcataatcactccagataacctgagagccatgcttgacccttctcattcaacaccatgttcaactgatcaataagctctgtcaactctgattgctaaatatcgtggatgtaaaatactgacttctcataaatacttctagtttcttaactaatgcttacattgtttgcattatattttccatgtctggtcttatactactaaaatctattctctaaggcaataaatccaccattttatttctccccacttagaataatatagtttccccatagtggaaacatcatttaacctttttttataacttggttttttgtttacctcctaagttttgaatctgttttaaaccctgtgcttcatattgttcctgtatagatcctgagtgtcacactatttataatctacttttatttgtacatcctgctctcctttctcttgagtgctttttgtatggtatagagggttgaattgtgtcctgcaaaatgatacattcaagtcctgacccttgcaacctaagaataaacattatttggaaataaattacttgaagatataatcaagttaaaatgagattatgctggattagaactgttcttaaatccaatgactggtatcccaatagaagagaagagtaaacacaccgggaaaaaggccatctgacgatgcaggaagagactggtgtaaagcagctacaagttaaggtacaccaaggatttttgagagccatcagaaactacaaagtcggaagaaagggatatttgcaagagccctcaggggctcttgatcctgttgccaccttgaggactttgagagaataaatttctattgttttaagtcaccaagtttctggtaatttattacaaaaatcctaagaaactaatatatatggataacttcttttggttttcaaaacttaattcagttgttacctatactgggaaattatcacgacttcctcactctgaattaaatctctttctatatgcataacccattcatacactatcatatagtataggaggagtatttctttgtttgcttgtttacctacacaggttgcttcatgagctctttcagcaggatcctgttttcaacacagtgactgggactcaataaacacgaaataagatgagtttgagtaaataactaaatccattaaatgcctcatacaatgcgcttggcactaagatacagaaatacgtagggtaatctcagtaaacatcctccaacaccctctactctcttccccaactcaagcagtgaccagatctcatttattaaaaactaaattcttctttttcagctcagagtaatgtttctatatagtcattttgaactttcaagattatttttaactccattcatggtatcttaaagaaacaaaattcctagttttgtttctttagttaactatttaaccgtaacatttgccttgaaatggttccatcacttccaccattcaggctatgacatgaaactgttctctagagcagctgcatcatggagtaatgcctaagccatttgaaattttgagtaattcaagggaaccctgttggtctggcctggtgcaagtttattgactcttaattgcgttgggtgaggggagagggaagaagagaagtgagactcaagaggcaattctcgggttctctcaggaactgcaatatagattccatttattcattttggcagttataaacataagtatctaaaaggatttggggaagaaagagttatttgttgcctaattccaaagcactagagaaagcatgttttactttcactttgtcaaagtacttataaaagttacattaaaaaataactttgagtagcccacatatcctcacataaagcctgactgtgtaagtgagccatagtatgggattaatgcctgaaaactatttttttttttttgagacggactcttgctctgttgcccaggctggagtgcagtggcacgatctcggcacactgcaacctccacctcccaggttccagcaattctcctgcctcagcctccagagtagttggcattacaggcagcttttgaacttctgacctcatgatctaactgcctctgcctcccaaggtgctgggattacaggtgtgagccactgcgccaggccagatgactgaaaactcttaaagagccctcaagatgattcaagtcctttatctagaagtatttacaaaaaaaagatgaagtttatttgcagtaactttaggtggcaatataatacttaggggcattttggggtttggggaagctatcagagaggccaattattagaaacaaaagagatgacagtgagtaggtaagtggaatctaagaccaagattctctcattttagagataagaccaagaccaccatcacacgcataagaggtcatatgtgaaatggtttttgatacccttactctatgttaatacttgttaccaaaataaaaccatagcaataataagactcagagaaacatattttatctttttgaaactatgaatcaacttcatctaactaatggtcacttttgtgcgtgtgtgaactattttttggctagatgtaacatactcagtttaatttagcatttgtacagatttctcatcttcactgacactgtaaagtgagcatggggtggggaaacctaatgatactcatttgaaaaagagatggggatgaattctctttcaactaagatgtaagattcaggttttctccaagattgtgtaagatggtagatcaaagaagtgatttagtaaatattgctgtaatatttcatagtggtctaaaactttgaatttgaaatagaaatcaagttcattacatccttttatagtaataatgtatcattttaatagtaaagttcctagacacctgtcagaccaaacaacggtaatttcagtgcttcatgccaattgtattaatcgatataattatacttttctgactattcttgagtataaatgcaaaaagaatgaggaaagaattgtcgtaatagtgatggggaaatatttatgtcacctccaatatgtaataagtacatgagtacctgtttatttataatatacattttgcattaatatggtacaaggaagcaccactaatataagaaagacctactgaaatatctttaaaaaaaaacagaaatactaaccaaatgcattttcatatattaaaagtgcatgtctgagagaagattctggaaagatggagtagaaagaaacaggagtctgtctgcctatctagacaacaattgaactggcagattcaattgatacgatatatggctattgatatatgactattctggaactttggaatctattgaaaaattgtaacttctggaggaaccttggatggtaaattaagttaattttggtcagtttcaacccctggcatagtagcagctacccattctccacccaagccctgtggcaggtagttgtacacaggttcctgaaacagcttgcatgtagtttgcagggtcagggtggcaaaaaatgatgctattctccaaagattgggtatttgtctctgttcactgattgttgcttcggatcactgaagttcacacaaagaggcagatgatcattatttttacacttcctcctctggctgaagtgagttccaagggatttaagggtttgacactctttttctcccttaatctttctcttttttcaattttgggagccagacattaaagactaggacattcaaaagtgactgcatatgaagaaaaaataggaagttaataaaaatgcccaaagaaaggcataggatcagagacaacctgagaagaccttaaatacacactttaggctgattcctgggacaaaggcagcctacaagcaatcaaaacaaaaggcaattaaaaacaaatagcaaccaagcaaaaacaataaatgcaggaaagtgggggcagaatctgatttctagagttgccacattgttagatttaaatgtccactttttgatcataaatcacagtgcacacaaagacacaggaaagtatgtctcattaaaataaataaatatacataaataaacaggaactgttcctgaaaaagatccgatggcagatctactagacaaaggttttaaaacaattatcttaatgagtaatgatgctcaaatatctaaagaaaaatatggataaagtcaagaaaatgatgtataaacaaaataaagatatcaacaaagagagagaatctaaaaagaaactgaaaacaaattctgaatctgaaaagtacaatatctgaaatgaaatatttactagctagatcaaagtgtacatttgaacaaatacagaattggtaaactaggatatgggagaatgataattactgagtctgaagaatggaaagaaaaaagattgaagaaaagtgagcagagcctcagagacctgtaagacaccatcaagcagatcaacatacacactgtgtgaattccaaaaggaaaagagagagaaaaaagggtgggagagtatatgaaaaaataatgtttgaaaatttcccaaatttgacaaaagacatcaaacatccaaaaagctcaatgaactccaggaaaaatgaactccacaccaagacattgtaatcaaatatttgaaagccaaagaccaaaaaagagtattgaaagtagaaaaaaataaaaaagcaactgatcacgtacaaggcagtcttagtaagatcattatcagatttctcatcagaaacttcagaggccagaagatagcaggctaataaatttaaactgctgaaagagaaaaataaaacctgttaagttagaattctatatctgtccttcaaaagtaagggagaaattaaggcatttccagataaacaaaatcagagggagttcattacctgtaaacctgccgggaatacattcaggatgaaatgaaaagacactaggttgtaccttgaaaaaaaaaaaaaaaaaagatttcagtaaaggtaaatacatgagtgattataaaagctagtattattgtaataataatttgtaactctacttttttctttctacatgatttaagagactaatagattaaaaattatttgtctaaaagctattaaaatttaactttgatttttaactccacatttggttttctacaaaatttaagaaacaaaagtatataaaagagttattaatttatgctttcatacacacaatgtgtgaatatataaccttatgacatcaacaacagaagggtggtaatgaggctgtaaaggggcagagtattcatatgctactgatgttaagttggtataaattcagattagagtgttataatattaggatgctaaatgtaaccctcatggctaccacaaagaaatttactatatgatatacacaagagaagataaaaagaaatttaaacatttcactacaaaaaaattcaacaaaacacaaagatagtaacgcaagaaatgaaaaacaaaaaagccataagatatacaaaaaatagcaaaatgacagaggtaagtctctcattatcaataattattttaactgtaaattgattaacctcttcctttgaaatacagagattggcagaatcggtaaaaacacataatccaactatattctgtctataggagacttattttagatatacatgcaatggaatattattcagtcttacaaagaaaagaaattccgatgtatgctacaatgtggataaactttgaggaaaatatgctctgtgaaataagttagtcacaacacacacaaatactgcatgattacactatgtgcaggacttagaatagcaaaatcacaaacacagagatttgaaggatggcaaccaggggctgaaaggaggggaattagggaagtttatctttaaagatgaagttttagaagatgaaaagagttatggagatggatggtggtgatggttacacattataaatatacacttaaaaataattaacatgtatagtatatgatacacacacttgatgacaatgcttttttttggaaaaaaaattcatgtccaaacatcttcacatctctcacacgccttccctagcattgatatattcaaagtagtttctaaattggttattttcagaattaatgcagaatgaaattttaataataaacttacaatatatacctgatatttatcttcttaatttgcatcatgtgttatttgtggaatgagagacaggacagtcttggatttattctgcctgatgcagagaccatgctcatcaagtcactgtatcaaatgctgtactaaaatttcttgtcatgttgttagttactgtagtttgctgctattctattttgtcatgcctggtttctgaagcatttggtgattcacccaaatattttatttagtcacaattgcctacatccttgacacttgacagatctctgatagccccatttttaccacgaaatgtcatttatcttgcatatcaatagctccattgactcctctatattactgtggcagatatggggtagacattgcccaggttcctttgtccattacacacaaagtcaacatgttaatcgtactacttatctaatggaatgcaaaaataatttaatatctattgaatcagaataaataaaaataaacttttttcaagaacagtaaaaatatatttttctgttacaaaagttaaaattaacaaacatcttttgacagaaaagcagctgataggttggaaatagactggaaaataagaatggctgttttaacatcctggatgagagattagattaaaaagtaaaaaccaactgactatctttgtttatagggacctgcagatgaatgaatgagaacactgaaaagaaagaatagaggaaataatgtgtgttttctaaagagaaacacaacggtgctgtgaaagacaatgaacaaaataagaaatgtatacaatgtataattatggacactgtataattaggaggcttcaaaattactttcaatgaatatctgccaattaaacgtctgtaaggcatgagttcctttatattgaggtatgtatgtgaaatgacttgtgttaccttttgcaacaattttgtcaatagtgaaatactgtcatcacctactttccaaattattattttaagcacttatatcttgacatattttaattaaaataaagtatttctttaaaactccttcatcaaaattaattccttgacattattttagctatatctaaagagtatcaaagactacttcaaaaatatttgagttttatatttttttataaaaataaattttatagaagacaaatttaagagtcttttaaatactttattatatttacatacatccacaaaaaatgaggagtctattaatgtatttgtactatatcttaaaatttgaatgtctaaagtatgtacacttttggctttcttcattcagttacttgaaataaatgttcataagcaaatattcatatttacaaatgcattctctaaataataacattataactatatgaaattgtctcagttaaataaaggttttgttttctttaagggaacaaatttgtactccttatttttaaaaactgaagattactttcaatcttaaaattatcacttttttcatcattatacaatttatttgaatttaatttcaatgaatattttagggtgtcttttggttatagcttcattatgtatacatgtatattaatcagaaaaacaggatcactaacaagtgatctgtgaatgggattatgggatttaatttaggagacagggtagcagggtggaaagacctgttagagtgtccatgaagaaatcattttcttccaaagtaaaaatataatatttgaatctagaacatgcccgactatttcaaaaacatcttagcaagttgttactacttccctcatcctgaaaggcagtactatgtttattggttaagaatttagactgcaagtcagcctgccaggcttgaaatcaagctccaccatttactaggtgggtacattagagcaaattacttaacaagccatatctaatttttcctaagcgtacaaggaggacattaacagtgcctactttatgaggctgcaatactaagtaaattacttcatcatacaacatttagaacagcacactatctaaaacaataaatgctaaaaagtaacccattaacgattagattattaattctgctaggtctaaccttgatgtactttacctggcttcaacttctaagcaatttataatttaaattgcagtttactttgcccctcatttcataacttccttcttaaaacagaaaaaaaaaaaagtgcccttttcaacataggaagtgcaccgaaagagaacctgtaaagcacatacccacacgtgttttcttttaggtaccaatttatctccagttttacattttcctactacagtttaaactaatcttagcctagaaaatcactttctcactcatttcaaattgcagaaacaggtagaaagatcttcttatcaaactaatctgctttaaatagggtaccttaagtctaacatgatgtgtttcgtagaagttattcgacctgaaagagaaaagcattgtatctcaaaatcctgttcagtttctcacaagtatcttaatattccaagtacattgtattattgtgcaggcattcactcattcgctccctgtccaaccactcactgccaagtggtttgtgctttcagtaaattaatttctcttccctatcctactgaaaatgtctggccaggcgcagtggttcacgcctgtaatcccagcactttgggaggccgaggcgggcggatcacgaggtcaggagatggagaccatgctggctaacatggtgaaatcccgtctctactaaaaatacaaaaaactagctgggcgtggtggcgggcgcctgtagtcccagctactcgggaggctgaggcgggagaatggcgtgaacccgggaggcggagcttgcagtgagccgagattgcaccactgcactccagcctgggtaacagagcgagactctgactccgggggaaaaaaaaagaaaaggaaagatagagaaagaaagaaagacagaaagagagaaagagagaaagagagagagggagggagggagagagagagagaaagaaagaaggaaggaaaggaagagaaagaaaatgtctcagccttatgacttgctttaaccaatgaaatttgagccattatgttatatgccatagttgtgttatatgtaacatcagagtagaatgtgtaagtggaattgcatgattcaactcaccctcttttccttttcccctttgccacataaagaacatatttctcttagggatttagcctccaggtaaagaaattagctggagatatataaaggattggcagatagaaacaatctgaaacaatttcgcttaaactgagacatagctcttctttggtcatccatctgcatgtaagataaaaatattattgtaagccacttaaattttggagttatttactatgtagcaaagataagacttaaatgatgtaacttctaggtataagacagagcaattatgtagttattttgctattgggcttccaataactcagtcctatatagagaggcccctactgttattcaccctgcctttactcagcttaatttaaattataaagatggtgatttttattagtactggttttttttagtcgcaagtgacagaaaatctaagccaaaagtgctttgaaaaagagtgggtgaaatttaatggtacacataactcaaaagaaataaaatttgagattcaagtaatttccccgtgacaaatccttctccaactctactctgctctggattcattgtcaaggtctgtgtggtgtcatggtagctgccaactactcttggcatacatcctcagaggcacaattacattgataataattaacctttgagtgcttacaatgtgccagacactcttctaaggcatttgcatgaattagctcatttcatcctcaaaatgaatatatcaaatagaaactaatattatcctaattttatagttaaaaaaacagatggacaaaaaaataagatgcctcataataacatatatatctatagatccatgtgtatatatgtatatatgtgtgtatatacatacacgacttgtgtatgtgtgtgtgtatatatatctaacacacactcgacttcttatggaatctaacagaaacagtgatagcaagaatattgcaaataaccgtatttgcaataatctaacagaaacagtaatagcaagaatattgcaaataactctattaatcatagtctactagaaaatatattgttgcaaaagtgttcaaacaaaatatactttccagccacaaaatatttgttatggttttaaaatcataacaacaaattaaagaacaaataaaaccatactgagatggcctgcatgaaaaaaaataatgttttattacataggcaaaaatatctaggacacagaccttggatacactgcatataccttctagtacgatgatacaggctatgcagttgagggtaagtacttaaaattgctacaaattattcctttagaatgttaggtgtaggataaaaactaaaatttttctataaattctatctgtagcaacatgagttttctataacatattaaaggaacacagaataaatcaaaagttgaagaaacataaattattttttactttagccaacttatatacttttattgcataacttgtaatttttgtttatgtaaagaagagcattggccctatgattttttaagctttgtataagaacttgatggtaacattaaaaagtagcaaatcaaatataatataaaagcagacctactcagtaactttcagcttattgggcttttgtactaatatatttgttaatatttaataaatataagatgtttttgtacctgtggaaaccccttagctgctctttgctaaatacacaggtgccttggtgtttctcaaagcacacattgcttcaggacttttgaattcctttccacctgccagcagcattcttctaaaatattcctccataattcaagtttatgctcaaattttactttagagaaaatgggctatatgggtttttataaaaacccatgtaaaaaacattgcttttcacactagttattcttctatgtcccgtatttatttttcttcatagcatttattacacacaacatggtacctctttgaagtagaagctcatgagggcaggaatgttactttgtctatttctacatccactgtgtctagaacagggtctagtacatggtaggcatttcacatatttctgtaatgaatggtaatataagtagaaatcatgatactatttagtaaacctcatgtaccaagtgttactcaacacgaataaactctaggcaaaagatgttattttggattatattaataatttcaggacatacttcttacatattggtaagtattgtacctttgtgtgtcagggggatgttgaagttcaaattttacttttaagatctgggagaatgtttagtaaattaattgctgatgattttaatgtacataatattaaaataatcatgtttataatagttcaacaataatttcataacaattcacctattttgtgaatgtttaagataagactagctaacaattattaatacaagtatgtacacacttaaaatttacactttacaacaattctatcagttaatagcattattctcatttttcccctttggaacactgaggcacagagaagattttcaaatgcccaagacatgagagtacaggtttgaaatttggaaatggaatccatccacactaacaatagtattacttttcttttcttttttttttttccttttttgagacggagtctcgctctgtctcccaggctggagtgcagtggcgcgatctcggctcactgcaagctccgcctcccgggttcacgccattctcctgcctcagcctcctgagtagctgggactacaggcgcccgccgccacgcccggctaatttttttttttttttttgtatttttagtagagacggggtttcaccgtgttagccaggatggtctcgatctcctgacctcgtgatccaccagcctcagcctcccaaagtgctgggattacaggcgtgaaccaccacgcccggcaattaggtgaaattaaagaagatgaggcagtgaaattgagcacttgtatttcaaaagtgtagaccgcttattaaattatattgaatcattattctataatgtttgggaacttattgtttatttccagagtagaattcaattactttaacagtagatcatagtgggctctagagaattaacagtctaattagttatttaaaaggttagaattaaactttcttaagttctttaagcattttataatcattaacattttcatagtactcccataatcatagcacatgtaactgggtctcatttcaaagtgaccaattaaaagaattggaaaaacaactaaccctggtttccatgttaataattgaatgtagggtggatatgggtatatgtgtctattatgcctttgtggtatgattatttgttaatattgtctgtaagtaggcttcagaagtgtcctgacattgtaactacaagacaaatcatccataaatataggaaagcatatctttaatagaagtctgtaattttatcagactttctttttgaaatatatgtcacaagaagcactgagaatcactgctttaaaaaagccactgcttgtggcttaaaattttgtgtatttctcattactcatatgacagtttgcattaccaagtattagtaattcagttgtttagttggttggatatacaacaaatcatttctatcatctgaataattttgttgaaaactaggcatcgtagtaattttctgttttctgttagactaatagcggggcttccagaactgagaaaacaattttcaggagggacatgaaaaatccattcagtcataaaaaaaagtaacaactatatatttacaatttattctatgataaaggcatatatttgcacatttatacctgtatcgtgcttatgagaatctgaacctctcagaaataaggcagtttccaaagcctgatagtccagtggcatcagagagttaatataatgtatcctttactccacattcatagattagagagtcaaagataatagctacggtgcaaatcttataaattgagaatatacattttgtttttctttgtaatagtttgttactattaaaagataagcttgaaactcaatgtgagttttctttattcttccagtaccactctttttcatgtttcttcttaagataattgatagtctctagagaattatctatccagtgatccaggtcactttcttagaaacattctagaaaaaaaaaaaaaaagaaagaaattctctttaaaggtgggaaacatatttatttctcattggaaatgccaagctccttttatcttattagataaggaacagttcattgctatttttaagaaaatgcttcatgcagtttcaaacccagtatttatgctgggtctggatttgagacaactttctttagactctcagattcttccctcagactttagcaggcactgcctacctctgccacaaagaagtctcagggttcctgccacactcccatcattcttctaaacaattggtagggaccagagaaaagatttagcaagaggtgcacacagtcattaattatgtaatttccagagatttaaaaactgttatgttgatccatccttggctgattagagttcattaaaatttcagccaaaaaataaaggaaatacagaaatacacagaatcttcccaacgtgagttgtgaactcagaataaaatagaatagagttaacatatgatttgccttaaatgactaagcttttctatatgtcttcgtgatactgtggtgcaaacttgttatttttactgtgaaaatttatttgtgatcatatgctttaaggcaaaacatgattttgaaatttatcagccttgaagaaacaaaacacaatttagcagttttgtagataacagaagctttgtttattttatatattactgtttatattgtactgttaattaaatctgttctcaagcaaatttcataatttctgagttgtatctcaagagaaataatttattatattttgccaatgtttataaacattgttaaagttgctgtcctctcttcgttatatagattagagatgcactgtcaaactattgtataatacgatagtcatcattactatcaattcttctttctgaattttaactcatttagtgattaaaacataggtatattaaaacactgaaactatcagacagtaaacaatatttcaaaagtagcaagatccatcatctatcatctatctacctatcatctatcatctatatatatatatctctccatatatatatatatccatatatatatggatatataaacacgtggcactttcatcaggttatcaaaactaacaatggaagattatgaatagaccactattcatctaaaactaatagtttcagtatgtaaaagagtgttgtatctttgtaagtaattatatttattcaaaaaagcttttgcacataccttgctatctatacccaaccccctcaaattgcctaaatgtttgcagagactcagctattgtctgttctactttggaagctttaccttatgaataaataataattatagatcatcaatattttctttagttgaatttgaaaggcactgccaagtaattcaagtttttaacattatatattttttaaagttagtatttattaaatgtagaacactctccaaaattacctttggcatattttaaaatgcttagtattatctattcttaatgttgctaataaattttggaatacgtaaaaaatatttagtacaaataccaggctttagaagatttctaccagcttgataaaagctttgagaatctacctatcttgtcatttgtaatgcaaatatacccctctttccccctcagcatactgtggattattaatggttaactgtgagtatttgatgctattagtaatatattattcatgtccatacaccaatattattttcttaaattgtcatactattaatatcagcttacagaggcaagagtggaatctcaattactgcagaattttgtctgaatattggtagtaacgtataacatagtttaaataggttgctattctgcaatgtgtttacaacctgagctaataaataaataaaaatttaaatgaaattcaggtcactttcatgaggattcctctgaagtcagcattaataaaaagttatatgaatgtcaaaagataatattaattatgatatttcattattatttgcagcatattaaagttgaaaagttctactatatttatgatactattacattttggattaaaagatctgttgagtaagaatcataatattgatagtaaatagttctacttttgtccataattggaattgacattgccttgacatctccttgaaattactagaccagaaagtaaaaccagagcacacaaagaaagaacaggatcagagccaggagaccaattacctctaatctttaccacatcagttttaaaaagtcttgtggtcatttcccctcatatggggtgactggtttggtctttacaggtggattactatgataacttagactttctctatccaggatggaacacacttgagagccttgtcagtggcataactggacatttttgataattgagtgcccttcgacatatgtccaaagaagctggtttgaattcctgaatcacaaaatacactttgtgcatgataatttctggtgatgcatttttatcaagtacacaagaacattattatgaacgtgtaggtctaatactggactgcctggattaagccctgctgtgcagagaactgagagtatgctgtggctgggtcaaagtaataactggatatgaataagatgacaagggatgtgtgactgttatttgacttctttaaggacaggagaacaccttttacatctgttcttagagttgtaagagtgatgctaaaaaccaaatttgaggagggcattgaaatctcaaaaagtcaatgtagacccctcttgggtcagagagttctatagaacaagatcctatcaaatggctgaatcctttattcaattacccattcacgagtaaatagagcttgttgtagaagaaacattgggatgtgacacagagaaaactacacagtaattgcccattacaactactagaggacagaataaatctcaaagtaggaaatggctagagagttatttaacaggttaaaaaaattaaacagataaaatatctacagaatttaagagattcttttttttttgaatataggaatttggcctggttaaaaggatgactactttgaaaagaaatgatttgtccattttatactttatgaaatttattatgaagaaatattacagtcattacttttaacattatagttcagtagcaacataatatatgtggaaaagtatatacagtaagaaagacaaatattacaaaattacttattttataataagacagactctatagaaaaaaatatgtaaaacagaacattttgaaaataaagtattgataaaagttagaatgggagggtagtggatctatgatacagaaggaagaaaaggcacagagaaataataaatttttgaggtaatgagtatccccaattaccctgatttgatcattacacattgtatgcatgtatcaaaatatcacatgtaccccataaatatgtacaagtattatgtgtcaatttgaaaagttaatacattcaaaagaaatagaacaggcaggttttgatgagaaagaactagaattcgactttaaaatgaaaagctagagaaaaaaattaataggaaacaagcctactcttagagtcctttttactttttaaaatatcccaagagtaaataaagtcatcatcacaggatgaaactgaccaagtggggttaaattatctaacaaaattacaccacacctcatgatgatggcattttaatgggaaatactgcgggcaactggtgtgaccaccatcacaggaagagtcatatgtgatcaatgtagtcccaccttgaaggaaaatctgagaaactgtggcagcacatcatgagtcagaataagatatgagaaaataagagaaaaataatgagagctagatataaaacagtgaccttgcccagactattgcatggttttgtatgactgtacatatgtgatttcttatggggacactttttacatcaactatttttggtgcacaacacccttagcatttcattatttttttcacgtttctcttagacaaaaagaaaaatataactgaaacatattaggtctaaacaatttaatcatcgtcatatgcacagtttctggcaaatgttgcagtaattctctcaaaaatgttaaataccatagggcacccttgtgaattttccatgatgccccaggatgctttggcacatagtttgagaaccatgtgtagttatttggtcgagtaatcacatattcatgttggcctccttgttttactcattggcactgctggcgcaaacaaaccattgattgtaggcctccgtaagttgaccaaggtttggaatcattcagtagcttacctctctgaactcttacactttcatctctccagaagttcaaacttacacagaattagatccaaggccaagccaactagatcatctagagttgatgtgaaggtactcactaggaaataaaatatcataaaaagtgtttttgtttctacatatatgtctctgttttcataagatatgtgtttagttttatggcattgcatggaaataacactctgaacctccatggtgataaactttgtatgattttttatttaattattcaattatatatgatagttgatatcattatttcaatattttagatgaggaagctgtgacttagtaggtctatgaaaaatttccaaatttgaaaatgacagggacagataatatgcacttcacaccaaagttttctgactctaaattttatagattttcttttaaattttatacagtctatatgtgtgtgttagagttataaataagatttaagatggttactcaaataacaaaatcactgaagaaatttcagaaagtatagagaagtttataaaagaaaataagtatataattataaatttgtagatggagacatagagacagattgatgatagctgatagatgataggtttgttgatagatcaattgattgattgatggagagtgatatcttattgttactaggtagggtcctcttgtcacaggatccttagaatgtgcctttgctagccgaaaacctctgtggtcagtggcgcctttgcccgagttttgctcaggcccactgggctcattcagcccactcagcctggcaggctgcattcggctttcactcttggcccagatcccatgcctgccaagggcaagccaggcgtggagcagcaagtggtgtgtgagtgagtgtgcgcagggaccagccactgtgcacagccaggcacgccagctatggcggggcaggcaactccaggtgctggcatcggtgctggctccttgctgcggctggaccagacataccacaagcaccttgcactgcaggcattgggcaacactgttggaccctgaagcttggatatatcaggaactgcagaaccccaaagagggtgtcacagccctggcttcgggagctcctaagtctggctccccgaaggaatgcagctcttctcaccttctctcttctgatcgcctgcaacatggcaagaggtggggagagggacgtgtttcagccctctgtgttacaactcttcctgtctcaccatttggggggtctcgccttcttgttctgcgtccaagaatgaggtacacggacaactagagagtgaggaaggaaaagaggtgctttactgagtgacaatatagctctcaggggacccgaagtgggtagctcctttccccaggcagctcgtcccgacagtgtccagcctttagtggaggggagactcacagtgagtagcaggcaggttgtcctgtagttcacgggcagctattggtgggccggaaaatccatcataagttctcactccggtctgcagaactgacagcccagtccccaggcttcagactggcccagccttgaaggtggggcttcactggggacccgcccctttctgcccaggagctgtctcctgctgccatcaacctactgctacgttgcctacagtgcccaggctgttcatgccaagcgccaactgcaggcccatgccaagctgcccttatccccacctcggcctccctcccatgctccttggtgcccaaagtccaaaaggggcagaggtagcagggagctggtgtgtcagtgctgtcctgagtgcaagcacacctagaggggttgcgacagagcctgggcttgactttaactttgctctgaaatcagagaggaccccgggagtggggagaggccaggcagtgggagcaggtacttccaagcctgcagggtcagaggagcttcccaggcccttgagttgataggaatgcctgggtccgcagccaagcttggatggctgcagctgcgtcctggagggcggggctctcgcccctttaactcagaagcgggtgtggctcccacttgttacccgctccccctggctccctggagtgcagagccccggccacgccttccctgctgaagtcagcgtctttgaagcagatgggctgctgctgccataaattcctcttctgaaacggtacatccaactgccattagggatgaagatgatgatcgctcttaactgctgacagggggcattattttggagaaaacagcagttagatctttctcagaggcctatctaagggtcctcagtaaaaagggagccaaggctcaagttgtgtgactccttgaagtttgatggtctctagatgagaagaaacaaaatttaccaggaggttaagcatgtgaaggaaaaaaaatctagtgtcaacaataacagaaataagaagtaaaacagactaattcttaaaacaatgttgtggctagagctgtctcatcctggtgaaagaaactgaatcttgtatgagggccggtaaactttaaaagagaaataacttttaggggagtaggtaatcctctgggagttcagaatagaggagtccttgacaaagacgccttatggtgaggaacagaacaaaggtaaggatggtaagctagaggtctccccaactataactaaggggttggggaaaatattggattaaactttttcttgagatgccctccatggtcctactaagagaggagtggaggggtcagattagagaggaaaactgaaagtctgctatggtgtccaggaggaggtccaccttcctcccttgaaatctgaaccatcagaggtgggagaggagccctgggacccatcaggtctcctggacccagtgacctgtgtctctggagacagtctgccttctaatggtcctgtgatggttaatagtaagtgtgaacttgattggattggaggttgcaaagtattgtttctgggtgcatctgtgagggagtagtcaaaggagattgtattagtccattttcatgctgctaacaaagatatagccaagactgggtaatttataaagggaagagatttaatggactcacagttccacatggctggagaggcctcaaaatcatagcagaagataaaggaagagcaaaggggcatcttacatagtggcttcaggctgtccccggcttaaaggtgaggcttcacagtggacctacccctttctgcccaggagcctatctgcctcctgctgccatcaacctgccatccatggcactcacggtgtccagactgtttgtgcctaggggcacctgcaggcccacgctcagctgccctcagtcatccctttgcctccctcccttgctcattggtgcccaaagtctggaaggggctgaggcagcaggggactggcatgtcattgctgtcccaagcacatgcaaacccagccaggtcacaacagtgcctgggctcagcctcaactttgcaccaaaattggagcatgcattgggagcatgagctgcatccaggatggagggaccccccactcctttaactcagaagtggtcattgctcccatgtattcctagcttccattgagtcttgtggaatgtgcagtcctggccatgcctcccccactgcagccagcatctttgcagcagccactccagatggtctcctattattatgagattaacacagtttagtgtgtatttgtattttagtttgatactgtggttctaagttttattatagaaagagcaataagaaggtttatattatggtttgaatgtttgtgtgtcttccaaaattcatgttgacatttaattcctgatgcaaaggtattaagaggtggggcatttaggaggtgattatgtcatgaggactccatcctcataaatggattaacgccttatatgaagtctcaaagggatgtagttgccacttcttttctttctaccatgtgaggacatactgccagtcccctttggaggatgcaatgttaaaggtgccatcctggaaacagagaaagcagccttcaccagacactgaacctgctggtgacttgactttggacttcccagtctccacaactttgaaaaacaagttcctgttgtttataaattacttagtctcagatattttattattgcagcacaatgaattaagatagtttacaataactttatgagtcctgggacaataggaagaatgtaatggcaataaaaaataactctgaaagcaataaggctttaattgtttactgcaatggtatgagaatgaatctaaaccagaaaaagcaacaactccccctgttacatttccctccatagagactcagagtcactttaatcagcatggatgggggcgggaggattatttcactatagagggaattcagaacaaatgctgtggcagttttatgatgctatgcttgggggaaatgatgggaaagggttaggattagaaaagcactgagtactgagtcagtaaagaaatgtgtgctcagctaggcatggtggctcactcctgtaatcccagcactttgagaggccgaggcaggtggatcacctgaggccaggagttcgagacgagcctgatcaacatggtgaaaccccgtctctactaaaaatacaaaaattagctaggtgagatggtgcacacctgttatcccagctactggggaggctaaggcaggagaattgcttgaaccctggaggcagaggttgcagtgagttgagattgtgccactgcactccagcctgggtgacagtgcgagactccacctcaaaaaaaaaaaaaaaaaggaaatgggcattcacggttttccctcatcttctctgtccccacttcaccctccataaggaggtcttagcagaagcacctgaagagggccatacagatggcctcatatgaagatacctagaaatagagacacctaggctaggaatgtcgatgcttacaagggcatggcttaccagcgggcctgagatttttattgtcacactctctggagactgcaatgtagtggctgtgcactagctagtttggagaggtagtttttctcctgaggcttgtcaggtaaggcctttgtgattgcttatggttaggcctggaaaaatcacacagcttcttaactgggagccaggactcttcaagagtagacatgactaaaagagcagcaaatacatgtccttggttcaagaagctattaggtaaaaaaaaaaaaaaaaaaaaaaaaaccagaaattataacacctctaaacagtattttgcatggcacccatctggatgagagagaattaagatacatcagtcaccttataaatcttctctcatttaaatcttacagtaatcagtgagattgatgtcattagacacactttatagagaaatagtgttctgagaaatttttaaaaattcatgaatttcacagtgcttttactggacaaagaaaaagtagatttattctatgtgattgttactaaatattcaaaagactcagtgtgttacctgacttccatttcccttaatttgtttttaatacatgtaaatcatttttataaaactaattttgaaaactggattgagtttcaaattttcatgtgatcacatttatcactttttgtgcaaatgtttttttttgtgaattgtctaagacattatttccgactacaaacagataaattagttgtattattttttactattcctttatattttaaataatcttaaagatttgttttcaaaaatatgattataataaagtttaaattaataaatgttatatggtagttatctactaaccaccaacaatactattatccaaatatgatttaatgtacagttcatttcttactttatgctggctgtaagattatttcagcctactaaaatctattttgtaatatctactgtatcatatgttatgtttctacttgtgcatggatctatttctaatcattttataattaaatgtaaagataaggaatgaatacctgtatgcaaattcagtgattcaaatcgtttccgcgttttcaaaaaagaatgtaatagcttgaaaaatttaagtaaaatgggtatgttttatatgcaaagattgctttgctaatatttgagagaaaatatagaaaatttatgagtagatacagaatggtggtttcacagttatttgaaacattattttccagacttttctggttttttttcaatataaaggacttttcaataaaatcttagtattcactttcccttaatgtcataatggaaaattatttggctatttactaataaagaggttttagacaaaaataattgcattgctggactgaactgaagagtgatttgtattaaatacatccctagaagtgtctttcaaatgcctgcaactgcttctgttaacttatgttcccagcttcattttattattgggaatgaccttaataagtaggcaggacacagaaaccatctataaggtactattttatgggcaccaggaaggccaactacccaaaatttataccctgcaacctgttatggtctctgaactcaattattaaagatttatttctttgttgctcagacccttttcagtcttctgaaacactgtcagaatgcaaatagtcctcagattgtgcggtctgaaaccatagcatttactaaaaaacaaaggcgaatataaaaacacaagtggatttaatccacatccacaccacttatttgaattataagaactgaatgtaaataatataaccaatttgtgatcaagtctgaaatcaaacccaggactcatgactgtcagtctaaagctcttgttttataatgaatctatttctactagataaatataaaataaagaccaatttgttttaaatgcattttgccttctgccatatgctcttgtaataggaaggaaaaaggctgtctcaaacttcaatttgacttctccattatcttctctttactcataaaatacacacatgtgcacacacacacacgcaacagcaaaaaataaccctgtatctatattaattaaaagattaaattaaaccaatggagcaattatttgctatatgttatttatcattcacttactaagtgacagcaaatacatttaatcttaacatttggttcatatttcagttcctccactattcggtcctaattttctatatttacatttatttagtaattttatataacaaaaataaattctagtttatgtaacaagaattcttatatatgcttagttgcctataagtaaacttcaaagtgaaataaaattctttcaatttccagagccatttctcttttcttactttaggctggctgtaagattatttcagcctctgagtatggctgtctaccatcattcatgatgatatacctctccccactctcattcaaagaagtctgccctatgtctattgcttacatgatattaaccactggtatttaatctttcttctatattaattatataaatattgtcaaatatatgctattaaataaaaatacatattttagaatctggtatttaagaattttttacagctttttttttcctacaactaacttaaatatcctgtgtgatggttaacacagtaagcctttatttattatggcagatagatgccttcaattatattcctcatgctactcactctaaaggtgacaaagaggttgtatctttcaggccaaattcatttgaataaagatctggttcaaggacacgggttctgaggcaacaagctggacactagagaaataagtgatggcacaaaggttgtgttattgctgaagcatatttgaatcttgctccatgccttcttttacttgttccatcagttctagctgccgactcaattctctcctccatgatgtattttgtgtttatcgctaattcaaaatgtatcacattgtatcataatttatggcttatctattctgttaaaaacttaatccattaagtaaagagttttattgactcatctattttcagtgcccaggaagatgcttagcatatagcccaatacatatactgaacgaaataattttaaaaatgaaattacattgttaatttttgtataatgagaaatgattaaattgaataaaagaccaatgtggaaaacacatctaaggattagcaaacgtgagcatgtcaaattattcctaaaacatgaaggtatacgtggaaattgcctaattatctaataaaaatataagtcaaataaaaattaaaaagctctttcattgcctttttaaaagtagaaatgcttaggcgaaattctatgccaaaagtcaataataataaaggtagatggccaaattaacatataaacatttaacatttgtatatgtgtacatatatatgtgtgtgtgtgtgtcagctgtataaaggaaaataagctttagtagattaccccaggttgcagtttttagtgacttcttcatgctaagtgaatgtaacagtacatttgaatgtgtcgtattattaacggtcctagaaaaaaacataatgactttaaaaagttaacagtgtgaagaaagtagtaccaatcacacacataatatatcagataatctgttttctgaaaatgagctttttaaattaaagtcaagaatatgaattaaaaatataaataaatccaaaatggaataaataggcctttcaaggacataattctatatgtttaaatatgatattaaaaatttttattcatgtgccgttgcttcattttttttttttgctcactcagctttctagtttgattgctgttaatattttgataagaaacagcgaactgtggataatctttcttaaaagtaaatatgattctacttctgctacaataagaatgctcaagtatgaataagcacatctaaatcctttaggggaactcattcaatgtgaaattgaatagatgttctgataaccaacgaaacatatcctctcagaaactaaattcactatatacaaatttgaacctcttctccaaatcttatctctgtcaatggcaacagcatttatctgatatcatatagacactattctggagaattttttcttccttcctttcttctttgtactcttgcatatgtgagcctcagtttccatatctgaaaaaaataagatattggaaataaggcaccacacaaaaccaactaccacactgacgtggttgatgataacaaaggttagtcctcaaaatcgatcatgttcactatcaccaacaccacgtctatttgcaacgttatgttccacacatgtctactgcacaatcccacatttgccaaggttattttaatttcctctctggattttagtaactgtatttttaaaataaacttttgtatctgcctttttcactttcattttatgtcaactttaaaaaataatatgttccctgaaaaatttatatatgtcagaagcctagctggcaaaatctaaatttatggtcttgacattaaaaaccttacattaattcactctaccatatctatgttactgaatctttctttattcacctttattcacaaatttatttatgccttttttttttttttttttttggagacggagtctcactctgtgaccaggctggagtgcagtggcgtgatcttggctcactgcaacctccgactcctgggttcaagagattatcctgccttggcctcccaagtagctgggactacagatgggccaccatgcccagaaaattttttctgtgtttttagtagagacggggtttcgccatgttggccaggatggtctcgatctcttgacctcgtgatccacccacctcggcctcccaaagtgctgggattacaggcatgagccactgcacccggcctatttatgccatattttaactagaatttaaattagcctgagattctcaaagcacaatataatttacatcgaaggtataaaagtaaatattacaactacttcagaaagaaatttaccaataattagtcaaattgaagatttgaatagctacattttacctaaaaaactcctaggagtacacttactggaaattttggcttctgtgtacaatgatcagggtacctggctattcattgcagcattgtgtgtgatagagaaaacattaaatgcatgtatacatactattacaggtaggagtatgcatcactgttgtaataaatataatgtaatattatttttgagaaatgctttggagctgtaaggaaaaatggtgtagaaagaatcatccactctatgggtctagatttagggttgttgcaatgatcagaaaaactaacacagtttgacagaatggataggaggaagcagaaactcgatggtcttgatggtagtatgaaggttgaagagtccattacagtgacccatgagtaaattttctgagcactaaggaaagcactagtcatgcagatgtaccaagagtagttagggtaccttgtattgcataaaaaaagtataataaattgccaatttttagacacccaaggattttctttcctaaccctacaacctgccatggcaatactattacttctacccaatacccctgaatttgaagggagggatttcattgcaaaagagttccacctatctggcttatgaaaataaacctgagaatgcctgatttctaataggcatcatgtctaaaatattttccatgatattaccatggaaaatatctgttgatctatggtgatatgttatatgtagttaatatcatatgaatgacaacataatatatgctatgatgatattttatacaatgataatcaccaaatttacatatagtaataatatcacaaattgttaacatatattaggggcttattttgtgccaaacgctgttctgttctcatttcttataatcaatacacttaattatcaaaacaaccataacataagggtattctgaaaattaccattttacacatgaggtaagagaggtcagagaagttgaacaatttttctagggtcatacaacaggtaggtggtagagttaactagtattatcaagtttgtcagtctctagaccacagattttaaatataatttaaattaatttctatataattttattcttagaaattatatctcagaagcatatttttatgtaacgtgttttatgtcacttaagtttaaaataatgatattggagtgtgttttgaaaacagagaatgaagaggcagagattagaaggaacagcaaattaatggagaagacaggaaggaatgtcatcaaaagagtttaatcccatcaagatccccaaagaagaattggatgccagtactctttttgcttctaactttctactcacatcaagtttttcccctgagttaatgagatatacatttggcccttgaacaacatgagtttgaactgtacagatccacttatacatggattttcttatgcctgttgctccgctaagatagcaagacctaccattcttctttctactcctcctcctcagcctactaaacatgaagatgacaaagatgaaaactctcattatgatccactttcacttaatgaatagtaaacatatttcttcattcttacgattttaataacttttctttagcttactttcttgtaaggatacagtatataatacatataatatgcaaaataaatgttaatcaattgtgtatatttatcagtaaggcttttcatcaatagtaagctattagaagttaggcttttgaggagtcaaaagttatacatgcattttctattgtgttaaggggctcccttaactcttgcagtgttcaagggtcaactgtacttcaattttacagaatatttgagacagaagagaagaccagtgtttgatgtagttcttgaatttgagatatttgattttccaaagtcttatatataatttaattattttcaaaagccttatgatattgatcatttatgtttttgttttactgttagcttaaatatgaatgaattgttcattctgcctagaaaaagtatgctttcaagcctattctgtcgctccatgtattaaacaaatagcttatatgtggctgtggaaatgagcattttttatctcatgtcaaaatcctacctatatattgttcctaggtagttcagatgtaccaaaaagccttagccagttctcacctttcattggtaaatgttttctttggttttgttcttgtttatttacttcctactctgagcatataaacctagcaatataatctatttgcttgtgtttgttcatcccattaaactgccttttaagggcaaggagcaaataaaacctgtaaatctcaaactacttactgcaatgtcaggaacctgggaatgcatggtaaatatgagtggatgacatatagtggtgtccggagccatgaataaagacaaggagagtgggaacctagtaccacacaactcccaggcaacttgccttaccctgaaaggcaagttaaggccaggaaatcaagttttgtgttgatttgctctatggcatcgtcatttgtacaatgtagagggcatactgcttagtatcgattttactctgatgattgcttaacaagcatagttatgcctaaatgactgatgagacaagtgacccaccaaggtggcagtgagacaaagaaatgtatctactataaagatgaaataattagaatgaaatatactgcccaggctttgccagtattgacttgctgagtcaaactttaaatacgtcttttcttaatagaaggaaaaaaatgaattgcatagggatatcaacatacctttcccaaatatctaatttgttctggaatttggtttcaaaataattctgctaattattcctataagctaaaattgatatggtttgtcttatattgattgcatggccatcactgtattattgaaagttctgctttatctgaaaaataaaagtttagggacaaaatagtttctgctattaacagcagaatacttatgcttttgtcccaaagtgatatttgagtctttaagacttttttataccatacaagtgtcactcactctggtgacagcacaagtgttagagtttccaatcccaataacaaataattttcaatcatctaggggtctgcataccaatctgtccttgattacatccccatataactggaaacacatgtaaaagttttgtgaaataccacattcttttgactggcaattttaatttgatcttgtgccataattaaacattacttcctatatgggcccaacctaaacttgacaaagaaaaaagcccaaatgcagcataattggttgattaaatacattaaatggaaagaaaaaaatgattaaagaaatgaatgtcccaagaaataggttatcagtaatatttagcccaaaatggaagtttcatattagtagtagtctccacattttctgaatttcattttcaaacccactcaacattcaagttgatattgtttatcatttcactctattatgcctctagtcatttattaattttaacctgaagtcttttatttagcttatgatacaactactgaaatgatttctagggaagttcaatgattattttgaaaagggcataagaccagttcaaataaggttaaggttgaaatttttacacatttttattgtccagagttacaaacttaattggatttaacaaaggcccttgactttgaagaaaagctgaagaatggaggcactaatgtttgctaaatgtagtgtccattgctcagaaaatcagatgatgtgtcttgctagaaagtgcaactagctacacactaaaaagaatatgaaaatcagaaggtatatttcacaaattataataatatactggatgtgaacaggagagacagttactgaacacaaacataataacgcggatcctgtaacgcatggtgtgtgtcaaaaaaaaaccactgtacaacgtattttaaaacttatgtacacaaaaccaaagattttcttttttacctagcccaaatgccatcccagccttagagtcctgctctttataaaaataaaataaagaaaaagaaaaaaattataataataattggtctcttttcactaggtgttcaagggaatgggcaaacatgagtgaccaataattcatttgacaaataattatttttgattattgtgtacctagcaatatgcagaagacacgaaacagaatcatggtaaggagaaagaaacaagtaggataaagtatacaaagtgtgagaaaagctaaattttacagtaaattttaattttactaaatccatgcatgctgggctatcttttggagtgagtactgatgtgtgtgcctctttttgtcaaggagggagtaatgataaaagaatagagatgtgttcagtcatattaacaattcttgttttctcaacttattaatttactttcattattcctgcttattatttgggagtggttggaagacattttaattttcagaatgagataggataaacattaacataaatcaatatggtataattattgtgtgtgtcaggcaatccaatatttctgaaatatgttcaaactcagagggcaatgggaaaatgcaacagcaaggagaataagtcaagaatattgacttgtgtcacctctctttattgacagctcattgatttcctatacatgtgtatgtgcgtgtgtgtgtgtgtgcgtgtgtgtgtgcatgtgtgtgtgtaacatattaggaaaccagctagaaatattagtaaaagctatggaaaagtacaaacttttcacttcttttcaaacaaaaacaatgacatattttgattttatctcattataagtatccactgattttaaccataatattatgggacagttgtggatcagtagagaagaagagaggatctattgttaacatgttggaaatgctgaaagcccatctcctctaatcaggagtcactaatatgatgaaaaccaaatataaaagtgtgtctcaaataagaacattatctattgagtatttttcaaaacatttgagggtatgtatataagggaaacaaatttagaaagccctagcctatagacacacacacacaaggacacacacaagcatgtgagcccatgcgcgcacacacacacacacacacaaacctataaaaatgtatgaaaatttcacaacaaaatattttaagtatgataaaattctgttttgcatttttatccttgtaaaatagatagtatcgccagttacttgctactttcccactgcttggaggttttgaattaggacatttaagtatgtttgggatttaggaacacatatatatatatattcacagtcatgaaagcataataaaatataaccttataagataacatatgtgggaaacttaagaagctggtgatgtttgagttatgtacattttatattcctacatagtttgattcagctgggtgtagttttctgtgttcacctagtctttcttgcaaattaaatcatgcataagcaagcaaataactcccattacattcagagttttctgtaatataacaatcatgtaggaacaaatttgcagtttcaaaaaaaagtattttagctgaactgattgtgtttgtctatcttgactctttccatgtggcctcaaggctgtgcagtttctaaagtaattctcacagtacatttgttgcttgctgttgaaattatcttatttatatcccttttatgagagacacagattattggtaatagacacagaatgagagagggatatggattgggaataattgctacaaacatttcattttttgcttatggagcacctgtgcaagcagtgttaagtcttctctaccacttcaatacaatttagaacactagattataataataaatggtatatgcatattccactttttggaaatatgcaattaatctggaattcagatacacacaaaattactctctgtctctctctctctctctctctcacacacacacacacacacacaccataaatcaatatctttcctaaaagtgatctctatcaggtaagtccctgggtagtccaaaaagtctccttgggcttgacatccacagatgatgaatctccagtttcatgtcagttctagcaaggttcatgaaaaggtttaggaagtttgctgtcaggcagtgggatcacttccagcctgtgcaagacttcaatgctaaaccaagttaaaaacaaacaaaaaataaataggtaagaaaataagaatgaataaagtaagaaaaaatagcaaaggtagaatttgtattgctgtaagtcagatatctcaaaaagtagtctagggacttctagcattcaccactttcaaaactatttgcataataatactaagccattatttacttttgcattctcattctctcaaaagagaaaagtagaatttctgaaggctacatgaattttgacatcacaaaatattaaaatacagtagatttgataatctagttgttttttattgtcagacttttgaaaaaaggaaaatgactctacacttttattaatatttatatttaaatatacttatttttatatattttatttatattaacatgtaatgggtacattattgttaaattaacagaaatattttacaaaattattttaattttcaatatggtaaatattgatgcatatagccacttaaaatgtatttggagtctcaataatgttgaataatttaaagttatcttgaccaagaagtttaagaagtgtcacagttaatttaaaaaaatctattatagcaaataaagtagttgaaaaaaacaactgtgaaattaaatgtctaaaactgatttgcattacatctgtattaatgtcatgagatagcaataatctgcagaatactgtagcaattttaaaatttttcccattcatttagagtcacacttaaaatgcatgataagtgaatccataataaatgataaaatcaagtagaaatattgctgttggaaatatgttaagctcaattgtttgtaagttcataaacaatttgaactaccaaattaagaaacatcatccatttaaatgaaccttcatgaaagtaagacatatataaatccaaaactaataatatggagagaacccattctgaaaaataaaacacgtaagttaagaaaatattggttgtttaataacaaaaatggcctctgccttgaagtacagactaacaaccatccatttgattattccctttgatgtttactttgcagttttaactggacttgagtaaaattaaactttttaccttggaacaaacctatatgtcctaaagttacactgatttaaattttatggagagaaaaaatatagagactgagaagacctagacatgggagttactagacaaagactttaaattagttattaaatatgttcaaagagctaaatgctaaaaaacagaaacatgagaataatctcccaccaaataaagaagagcaacagagagaaattattttacaaaaataaatttaaatactgggtttttaaaaaaaataattaaaatttataaaaaccatgctagaatttcttaataactaatttgagatggcaaaagtaagattcagcaaacttgaagacaaattaaaatcagccttctggggagcagaaatacatctgaatgaagaaaattaaacacagaaacagtgacatgaggaatatcacaaagcatcaagcacttcatcaggaaagtcatgtaataaaagagggacaaaaatgtcataagatatatagcaaaagagaaaagtagtatgcataaatcctatctcattaaaaattgaattaactgtgaatgattttaaaatttcaattaaaagtcacggtttgtaatattgagctttacaaagtgatccaattatatgctctctataacaaatgcactttagattcaggcataaataggttgaaagtaaaagtatggaaaatatatactatgaaaatcaaaaccaaaagagaattgaggtgggtataacaatatcagactaaatagactttagaaaaaaaaagttactagagataacatgtagaggaatatattataataataacataaagaggaaatatattataataacaaaagtgtcaatccctcaggaagatataagaaaattatacacatataagcatctaagaacaaaacctcaaaataagtaaaacagaaactaataaaattgagtggagaaatagacaatttaacaacaataactggaaactttaatatcccactttcaataatgaatagaacaaatagcagaatgtcaagaaagagaggacttataaggacgttataagcctactagtcattatacacatttgtagatgtgtataaacagcagaatacacattcatctctaatacacatccctctcactttcaataatgaatagaacaaatagcagaatgtcaagaaagagggcttaaacaacaccataagcctaccagttataatacacatctgtagcgacctccatccaacaacaggagaatacgcattcctctctaatgcatatggaataaacaggcaataaaacatgactcagcaaatctaaaaagtaaatcatacaaaatatgttgtccagccagaaaagactaaaattaaatatcaataacagaggaaacttggaaaagtcatacataggtgaaaattaaacaggaaactactaagtaaccaactgatcaaaaataaattacaacagcatttagaaaatattttgacatgaaggaaaatgaaaacacaacatgccaaactcataagatgtatggaaattagtgctaaaagggaaatgtatagctataaatgcacacattaaaaaacaggaattattttaaattaataatgagacctccaatttaaaaaactattaaaagaagaactgaatacagaagaaagaaaaggaggtacatgttaacaattagctctattttagtccataaaatagagaatagaaatacaatttaaaaatgaatgaatagccaggagtggtggcacacacctgtaatccaagctactcaggaggctgaggaagaagaattgcttgaactcgggaggtggaggttacagtgagccgagattgcgccactgcactctaccctgggtgatgcagtgagactccacctcaaaaaaataaaataaattaaaataaaataaatcaataaatacttaaaaaatcaatgaaacaatatttattcttcagaaagattttaaaaattgacaatcttttagaaagatttgaatacaaaaaaaaataggagactcaaattactgaagtcaagaaatagaaaggtgacgctactacttacctgaaaaaaaacaaaaaaggattgtaagagaatagtatgagcgcaccattgccaacaaattagataacctagatgaaataggcaaactcctacaaaggcacaaactatcaggactgacttaagaagaaatagaaaaacctaaataaacctataacaagtctatatccacaaataaaaacttagcaatgctgaattctattaaatgtttaaagaataattataatggccaggcgcggtggcccacgcctgcagtcgcagcactttgggaggccgaggcgggcagatcacgaggtcgggagatcgagatcatcccagctaacatggtgaaaccccgtctctactaaaaatacaaaaaaattagttgggcgtggtggcaggcgtctgtagtcccatctactcgggagactgaggcaggaaaatggcatgaacctgggaggcggaactggcagtgagccgagactgccccactgcattccagcctgggtgacagagcaagactccgtctcaaaaaaaaaaaaagaagaatatttataataaatcctttactaattttaccaaaaatggaataagacagaacatgtcctaactttatctatgaggctggtgttgccctaatactgaaaatagacaaaagcattacaaaaaaagaacaccagtatcctttatgactaaacacacaaagattctgaaaaaaatgcagggtaactgaaaccagcagcacataaaaagtatcatacaccatagtcaagtgtgttttatcctaaaaaacaagattggttcaacataccaaaacaaaacaaaataaaacaaaaatgaacaaaaaacagtgttgtaggttatattactagaataaaaagaaaaaatacccatagccatttcaatgaccaaatccaacaaccttttataattaaaaaaacagtcagaagactaggactagagaggaacatcctcattctaaaattggcatttgttaaaaccccacagctattatcatactttataataaaatattaaaaatcttccaccacagatcaggaaatggataaggatcttcattgttgccactactattcaaattttactggaagttccggcgattaggcaataaataaataaataaataaataaataaataaatctaggtaagagaggatgtagcaaaattatctccattgagggagacatgatattctctgtaaacaaacatgaggaacacagaataaaaatactatagagctgataaggagttcagtaatgctgcaggataaaagatcaatatacagaaatcaattgtatttttatatgctagtaattaacaatccaaaaatgaacttaagagaacaatatcatttgtaacactatcaaaacaattaaaatatataagaatatttaaatagataagtgcaagaattgtacactgaaagttacaaagatggtagtatgtcctcaattgatatacagattaaacactatccctatagaaatccaagtggcttcttttcaaaacttgaaaagttgatgctaaaatttatatggaaatgcataagagtaagaatagcaaacacgattttgacaaagaagaatataattaaagaatccatactttctgatttcacaacttgttacaaaaatacaataaacaaaattttgtgatagcagcataaagatagacaaattgagcagtgtaacagaacggaaaatcaagaaataaacctactttttatgagcaattgtttttgacaaaggtataaagagattacagtgaggaaaaacctttttaacagatggtgctgggacaactgtatatccacatgtaaagcaatgaagttggacatcatactccacattctatgcaaaaaagaataactcaaaatgtatcaaagacccaaatataagagcttaaactataaaactcttagtaaggctgggtgtggtggctcagacctgtaatcccagcactttgggaggctgagatgggcgaatcatgaggtcaagggatcaagaccatactggccaacatggtgaaaccccatcgctactaaaaatacaaaaaattagctggacatggtggcacgcacctgtcgtcccagctacttgggatgctgaggcaggagaatcacttgaacctgggaggcggaggttgcagtgagccgagatcatgccaccgcactccagcctggtgacagagcaagactctatctgaaaaaacaaaccaacaaacagaactcttagtaaatcatatggacataactctttgtaatcttgaattatgcagcaacttcttagatatgacatggaatgtggaagcaacaaaagagaaaatagataaagtggactccaacaaattttaaaactttgtactctaaggaatctatcaagaaaatgcaaaaacaaccaacaacgttggaaaaaaattggtaaataatatacaagataatggtctaatattttgaatatgcaaagaactcttacaagtcaattaaaagacaacccaataaaattatgcaaaggatttgaatagacgtttgttcaaaaaatatatacaaatgcttaataagcaagtgaaatgatgctcaaaattattagccattaaagaaatacaaatctcacttcacctcattagtgtgactattattttaaaaaaggcagatatatcaattcctggcaaggttgtggagaatttggaactatcctaccttgctggtgtgaaatgtaaaatagtgtagtctctttggaatatgttttcccaattctgcacaattacacattattacagtatgattcagtctttccaattctaaatatatagccaattgaaaacatatatccacacaaaagtatttgtattagtttgttctcacactgctataaagaaatacccaaggctgggcaatttataaaggaaagaaacttaattgactcacagttctgcatggctggggaggcctcaggaaacttacaatcatgtggaaggcagaggagaagcagccatcttcttcacagggccccttataaaaccatcagatctcatgagaactcactcactaccaagagaacagcatgagggaaaccgcccccatgattcaattatctccacctgttccacaatcaacatgtggggattatggggattacaagtcaagatgaaattttggtggagacacagagcctaactatatcagtcttatatttggatattaatagcggcataatttataatagctaaaatgtataaacaaacaaatgtccatccactaataaatgaatgaacaaaacacaacatttccatacaatggaatattttcatctagcaaacgtaataaagaattgattcatgctaaaatatggaggcaagttgaaaacattatactgagtaaaagagaccagcacaaaaggttaaatattgtgtgattctatttatatgaagggatcaaaatagtcaaatccaccaattcagaaaataggttgccaggtttgtgggtaaccagggagttactgctgatgggtacacgttgtctctttggggtcatggaaatattctgaaataaagtattgctggtatttgcacgattttattagtacataaaaaccactgaattgcacactttaaaaggataaaatttatgtcatgtgacatatctcaattaaaagcatcatatgtggaaagctggatttggcccaaaggcagaagtttgttaactctttcatctcctcatgtgaaccataaaaaaggatctaaattactaacctattgtcactaggtaaattccacaagagcaatgacaaagatactagaaatgtcctcgtttccaaggtctttattttgaatcatcacttgtttagatagaatcaatcagttcttccttctacttggtttgagttgtcacatgtggatttgctttttattatattagagtcactcaaggaagcattattgccagggttcattaaattttgagaaaatttttcaaattttattaatatatgaactgttaagtcaaaaatgacttggcatcttaaaagcttcacaattaagctgatactgaagatattttaccacatcagttctctcaatgtttccaaattttggggttagactttttataagcgaacttgattttatccattggctctttgaaaaatcaaaagccttggtttagttgattgatagatttttttcctccaaaattttgtttggaagatttattgccaatacatgattgcattatcttattgctacacctgtgatctgccagccccccacacccaaaattggaacaattatttcattagtgtttctaactggaaactatttggctctttaatggtagatgatcacaatttgtctcatcgtctactctaatctccttaggagtcctagatttagtcctctgataagatgccataaaataaaataaagaaaactctaatctacagaccttactttagtctgctctgatattgaatgttactttagagaaatctgaaagtagcattttttattcatgagaaatttatttcttaatattagtgattcacatcaatttccttgagagcatataggaaatagaaatgatcagtaacatttattgaatgcacaaactattttttgaaactaagtaaaatatttcagtattgttagacaatttctggtttcaaaaatattaaaaaacatcttggatttaataaaaagcagtttaatatactagctattatatgcaagctattcattatgccactcaatcaataatactactctgaaataatgatctcaggtataccgataaggaaactggagatcgtatggagaaagacaaatgataaaaattacaataaagatatgaaagatgagctgctaaaagccaaaacaaatgatgacagaccttcttagagagagagaaagtaactttctctctgcggtggtctgcctaaaaatgaatacaatcatggactaaaggaagtaaatgattgatcatagatgacacaaacaaatggaaaagtatttcatatgcatggattagaagagtcaataatgttaaaatggccatattgcccaaagcaatttacagatttaatactattcctatcaaactaccaatgacattttttgcaaagttagaaaaaaaaactattctaaatttcttgtggagtcaaaaaatagccctaatagccaaagcaatcctaagccaaaagaacaaagccagagacatcacattacctgatttgaaactatactatcaggctatagtaacaaaaacagtatggtactggtacaaaaatagacacatatacgaatgaaacagaatagagaactcagaaataaagctgcacacctacagccatatgatcttcaataaacttgataaaaataagcaatgggaaaaggacaccctattcaataaatgatgttgggataaccagctagtcatgtttagaagaatgaaactggacacaagatggtttaaagatttcaaagtaagactttaaattagaagaaacctagaagaaaacctaggaaacagaattctggacatcagccttgagaaagaatgtattactaagtactcaaaagcaattgcaagaaaaacaaaaattgaagaatgggccctaattaaactaaagagcttctgcacaacaaaagaagttatcaacaatgtaaacaggcaacctacagaatgagagaaaatttttgcaagccatgcatgtgacaaaggtctaatatccagaatctataaggaacttaaatgaatcaactaataaccctactaaaaaattggcaaaaggcatgaacacacacgtctcaaaagaagacatacacatggctaacaaacatgaaaaaatgctatcatcactaatcagagaaatgcaaatcaaaaccacaatgaaatactatctcagcccagtcagaatggctgttactaaaaagccaaaaagcaacagatgctggtgaggctgaagagaaaagggaaggctcatacaatgttcgtgggaatgtaaatgagttcagacactttggaaagaagtttggacatttctcaaagaactgaaaacagctatcatcaaaccagcaatcccattacttggtatatatccaaaagaaaacaagttatcctatcagaaaaaacacgtgccgttttatggtcattgcagcactcttcacaatagcaaagacatggaaacaacctacgtgcccatcaattgcggattggataaggaaaatgtggtacctatacaccatggaatactatgcagccataaaaaaaagaacaaattcatgtttcttgcagcaacatggatgcagctgcaggacatattctaagtgaattaatgcaggtacagaaaaccatgtaccacatgttctcacttatacgtgggagctgaagactgggtgctcatgcacataaagatggcaataatagacactggagactactgggaaggaaagagggaacggagcaagggttgaaaaactattagatattatgctcactacctgaatgctaggaactgtgaagaccagaagaaatattgataagttatcctggaccctgataccatctcagaagaaaatatatttctggataattgacaacccttgagactcaggaaaggaaagcttatggatatatttatgtaaaagaaaaactaaatttaggaaattttagtgacgtaattagtcctagtattaatgagagagtagtttcctgcaaatgaattcactttcaatgatgtaatacgattcggaattgttcagagaatgaacaaaaggttctaaattcacttttagataaacatattacctccagccaaaaggacacttacagttttatttcttgttatttatgcaaaactaggtatgatatatgtgctctttcaaactgtatatctttgatctgatattatacccttttgtcttccatgtgtcagagacagatataccacaaggtttgatttgctttaaaaatgctatttgttttacttagttttactttacaccaatttggagtattaataagtttgttttagttcaaatgatcctgcattaagtgttgataaggcaaaggaaaacattgatctatcaacaggaccagtaaaatctgaaagaaagtctagcttcgcaaatataaaaacatatatagaaagaaataaatgtaaggagattgttgaattagtgcatccagcataatcagttttaactattctgtgaagtactcaaaatcgaagtgacaaggaataaaattatggcctttgttatcattaggccatttaaagtctcaggaaattacaaggtgacagtttagcagaaagtgacagagcatggactttgaaagcaagtaagaccagatatggacattgcaattcatgtctggaaatacctttgataagtagcttggcttttataatcatcaatttaatttatttaacctctatagcaaaggcgataatattatacatcatttaaagatttttgtaaaaattaaatgaaacaacaatgtaaagtgtgtaggctgtcacacagcttttagtatatattagctattctattatttgcacaggtttctattatttgtattttaattttgtatgacaggtcatactaccaacatcaaaaagatgttaaggttttccttttcttttcagtcaagggcaagttatttttatttttatttattcatttatttatttttttgagactgagtcttgctctgttacccaggctgtagtgcagtggcgcgatccaggctcactgccagctccgcctcccgggttcacgccattctcctacctcagcctcctgagtagctgggactacaggcgcccgccaccacgcccagctaatgtttttgtatttttagtagagacggggtttcaccgtgttagccaggatcgtcttgatctcctgacctcgtcatccgcccgcctcggcctcccaaagtgctgggattacaagcgtgagccatcgcgcccagccagtcaagggcaagttctataacaaaataaagaacaatcattgcattatttttttaaaaacaatttgagttctgaaatttttaatgccagttttaggatatctctttactgcaatagcatcatccagttctctgtactgcagagagtatgtattgcaactttctatgcaaattgcattcacatttacatgttgaatgcacagatttgatcatgcaacttcactcctcaaaaaaggaaaaaaggaaccctagtttcttaatgtataaaacttgaagtttaatacctttagaatcaaatttaattatcttcccaacttggccccaatctaacttgccttcgattttcttatgtcactcccgcccccattcctgtaacatatggatagtcaaattttagtgggacgatttggaaagatttaattgctttaatataaagatttcaggcaaaatactcaaaagtacagcccaacaatacatatctctgtaatatgtgtatcatattttgaaagctacagaaatagcaatttaatgttacaaaaagatgtttttatccttttacttcatagctgttatcttttaaaattgtaaaaaatcaataccctaagtcataatgacatggttcttactacaacttgtgattcttttaaatttataaattaagactaaattgtgacttaaacataatggatttaatgtttgtaaaataaacaaattttttaaaatatacattaatatttaaatctattaaagttaatactaaacattaactttattatctaaaataaaatcaattctattatatttatcttttaaagtggttaattcgtgaattttgttcactaaagagaacaaattaatggcatcctctactttaaaatggcaatcttagtttgatatttatgtaacaacctctcactgcagtagctccgataaattattaaaatcactagtgacttgaatactatctatctatttaagttattagaggcctggacacaatgcacactcctgaaattctgaaaaatattaacatatgtgacacaattatatttattcatataaaagctcctataagtaagacagcattataaaaagaaatatccaaattttggttaaattaatgttaaaataaaacaaaaacaatgaaaattaacttgctggaaaaaaaagaaaactaaaattaaatatcagaatttaaataaaactccagcttttatgcagaaataggctgaaatgagcaatgtgtaaaagagcaagcgatgggagcaaatagggatttggtggtaacctccaggatttgcatgaacagatgggtttcatactatgggaacatgttgtggacccttcagggcacccctagagtagactgtgtgctgaacagaatgggagtactctagagaaggttcctagagatgacaattatgcaaggtagagataagaacctcttcttgtgaataatttttgctagcacaatacgttaggaaggaaacttgtgagtgcagaagtgagatatatcacagctatgcctttgagatttataaatattaattatgtacatatgtatacttctactaagtctatagaataatgcctatgtcaagtaattttaacataatatatttactttaataataaatgcacatcctttgcattgattaaagatctctaactcatctgtatcaaaagtaagattctaatatttaaattaggcctcattctaataacttaaaatttcatttgcatatgcatatatacaagtatataaatatattcctaagtgcatactaaatatctaattgtttcaatcacacatagcttttctctttttccaatatcaaaatgttgatatgtgtttgctttgtaaaagaaaatacccagaggtatatagtattgtaaaaatcagtgaaaaaatatttagagataagctttatgaataatctattttatagaagttatttcttccagaagtaagatatttttaatcacagaaaacctccgagttaagtatgtaagcactagaatgagttatgaataaataaagcggcactatctataaacatatttcattcttaaggaggaaatttctgaaatatcaaaaacacattgtttgtatccttatgaaataggcttagaagtaaaagatagcctaacaataatttttaaattatttttaaagctatgaatgcatttttcttccttacattgtattttcatagtttagtatttgcctgaagtacttcaacaaagattgagattggcagggtaaaggaaaagagtgctccctatgatatcccatcaaaggtagaagaaagagagtggttaggttaaaaaaaattttttttcatggtagataccaacacaatcatcctgttattattatctgttgaattgatgacaattttcaagtggcacttaacacagacacaaaagtcatctatagccttctctggtgtttacaggtactatgcagtcaccagggacttcataactgtgcttgaggctattattcctttcattaggctttccttttttttattatgtttgggctttgagttttcaccgaaggtcaaagtataactttcatgcctgaaagcctgtttttttgagtacaaagaaagtgtcagctaaaataaaacatcttccactaacaaacccatttctaccttcaagtttagcaggacttttacaatgaaactagagatagataaattccctagctgggagaagaaatatgcaggactgagttagttgttactctatttacaataatataataatagaataattggtgaaaatattttaagcacactgtcattcatataagtcccaatgtgaagaatttttcactctgttctcaccataattttggttatttcccttttaaaaatagtaaattttattgcaacatactgttcattccccaattgggtcaagcctggcaatttccaagcagggctggtgcagtttagtcaatgtagcaagagcaccatctttactcttcaaattgaggaaacagtacaaaactaagtccacaagaagcaaaggagagaaaaaagttaaaatgaccaacacaattcctgtgaatttccatatgtccttaacttttaaacttcccacagtcctgacaggtgggtggtttcccctactctttctcttttatgttatgctgcctccaaatttaaatatgctttcagctaggaccaagatgggccttgacacatggagtgtaaaaaaaacctcaatgtccatacttccaagggtgttaggtcctagttctaaatgagactggtcattaaagttgtttgtaaatgagaaaatgtggaaacaaagtatagcctcataaaatgggccagaaacacttttaaattgagtcagatcaccaaagctcaccaaagctaaggtttagggataggttgctatcctcgtggagaattaccatgtgaaattctcatggtgaaattaccttgtgaaataggaaggactagggcagagacgccattgagccaagtgaagaccatcagtttgagttagatagaaaagttcaaccctgatcatcacagaaacttctcaggtggctaaatgtctctcaaagacatatgggcaatagtgtgggggatggtaacaacaacaaaaacaactgcaacaacagtaggaacaaccataaacagttcacattactcaaacttctggagatacagagaaaacacaaaattgaaataaaaaagacctaaactgaagtcttgctccatctattactagcaaggcagtatggatcaaaagtttctaagttataataattacacattattgtggcccatgagctaaaatgtgctgacctgtgttctattaatttatagtaaacaaatgaaaaactcttattaggagaagttgtaaaggcaaaatggaatctttctcaaatagttccaatgcccctgtatcttactgccttcttcacatttctatttgtatatacaatagacatatcaatcataatattcccaaattagagctccagagctccccaccttccaacccacttctttgatagtctttgtcaactcaatttctggtaactccacatttctagttacttaggcaagaattgagaagtctactatgccttcaaaaagtatgtctttaaaattatttaaggtaatggcacatagctttcacttgaaaatgaaaaattgcaaggcgtcctaagaactaggataagaattggctgtcagatctgcctcattttaatggcccaagcaaatcacaagctgcacactaagaaatgatgaagagaaaatataccttcctcttttcataggagggtctacatagtctcatgacaaaaggagtggatacaggaaaagttgaataggtaaggatgaaaatgaaatataccaaaggataatttaacctccccctcatgcttatatttattcatgaaacaaaaaatactgtctactctgtgctagatttgtgtataggtagtggcaaaatattttttgttcctttttaatgatatttttaagtggaagagttaaataattgaacaatttaaaaatcatgtaagaaatatatagtttgtgataagtactatgagtagataagcagcatgctctgattttttttagaaaattttattttgcttagccaggtaggtgattaagttgagatatgaaagatgaagggagaatacataagaaaaactcaagcaaaagtcatttaaagaagatcagtgcaagtaggggtgtgtgtgtgtgtgtgtctgtgtgtctgtgtctgtgtgtcttgtgtatgtgtgagatgggaaaaacatgaaccgtggcaccagaagtactaaatttaaatcctgctctttgtttaagttcctggtgctgcaattacaagtacttcatacaattacaacaaaagcaaacactgacaaacgggagctaatcaaactaaagagcttctgcatagcaaaacaaactatcaacagactaaacaggcaagctacagaatgtgaggaaatttttgcaaactatgcatctgacaaatgtctaatatccagcatctgtaaggaacttaaacaaatttacaagaaaaaaaaaccccataaaaaagtgggcaaaggacgtgaacaaacacttttcaaaagaacatacatgtggccaaaaaacatgaaaaataactcaaaatcactgtcatcaaaaaaatgcaaatcaaagccacaataagttagcatttcatgccactcagaattattattattactattattttgagatggagtctcgctctgtcacccaggctggagtacagtggcccaatctcagctcactgcaagctctgcctcccggaatcacaccgttttcctacctcagcctcctgagtagctgggactacaggcgttcgccaccacacccagctaattttttgtatttttagtagacatgaggtttcaccgtgttagccaggatggtctcgatctcctgacctcatgattgcccacctcagcctcccaaagtgctgggattacaggcatgagccactgcgcacagcccggaatggttattataaaaaaaaaaaataaaaggatgctggtgaggttgcagagaaaaaggaacacttacacactattgctggaagtgtaaattcactcaaccattgtggaagacagtgtgatgattcctcaaagacctaaagacagaaataccattagacccagcaatcccattactgagtatatacccaaaggaatatgaacccttctattataaagacacatggacacatatgtttattgtagcactattcacaataacaaagatatggaataaatttaaatgatagactggataaagaaaatgtggtacatatacaacatggaatactatgcagctatgaaaaagaatgatataatgtctgtgcaggaacatggatggagctggaggctattatccttagcaaactaatgcaggaacaggaaaccaaatactgcatcctctcacttataagaaggagctaaatgatgaggatacacggacacatagagaggaacaacagatgctggggcctactgaaggttggagggtggaatgagggagagaatcaggaaaaataaataatgggtactaggcataatacctaggtgatgaaataatctgtacaacaaaacttcatgacacgagtttacctgtataacacacctgcacatgtacccctgaacctaaaataaaagtttttaaaaaggaatataataatactgagtgtggaatcctacttggatattgaaggacaatactgaaggatcacttttgaatgatcatagacataaacattcagaatactactctatacattataaaaattatttaggtcaactgcttgagatcaatgtgatcatcatctctgttttataattcagaaaataaagatttgtaaaagctaaccatttgactacaaaaacaagactaagacagctgaaactggaatttgttcctgggctgtatgcttagctactgtagtctgtatcattgtatattactttagaacatttaaaaaccagtttgtatttgcgttatatcacgcaaataaaagacaaatttaaaaagagacacattatttttctacctttttttccctcacatttgaaatatcttccgtggacaacctccactttcatatctctagtcagagaactatgtggtgctatgaaatttacatagcagttcagggtaccacacccttttattttactctaaatttaatctaaaaaagtttctccaagaattccaccctcagttttttttttttgctctaattgtttttccctagcaattccatctattctaacaattaaattaattaaaggctattctgatcccttctacaactgtacttctagtatcagtttattcactgcgttgagaagaaatgcataattctaacaacctgccagatagttccgtcttgaaggtctaaagtcatttcaacaagaccaacagagtgataattactcttttcgctaccaaaacttgttcttaattcccaactttgtatccagttaaaaatattagtgctgatctggccgggcgtagtggctcatgcgtgtaattccagcactttgggaggctgaggccggtggatcatgaggtcaggagttcaagaccagcctggccaagatgatgaaaccccgtctgtactaaaaactacaaaaaaattagccagatgcggtggcaggagcctgtaatcccagctactcgggaggctgaggcaggagaatcacttgaacccgggtggcaaaggttgcagtgagccaagatggtgccactgcaccactccagcctgggtgacggagtgagaatctgtctcagaaaaaaaaaaaaaaaaaaaaaagttagtgctgatcgaatccaatttcagagttatcatcaacttacaatttttctttcaatatatattgccatttttggactaataatttcttattgatgccaacagaaatattgatttcgtatttattgtattgaaaatttattaaaattgccatatttataaggcttttctttatttttccccctctcccattttttccaccaatggcccctcaccacctgaaacacagatgtggttttatttctatgtttaatgattgtgttagactaaataagtccctacaaaattcaaatgttgaaatgcgaaccctcaatgtgatggtcttaggagaaggggtctttaggagatgattagataatgaagatggagacttcatgaacaccattattgcccataaaaagggaccccagagttctctagacctctttcttctatgtgaggatacaacaattatatagctacatatgaaccaaaaagtgagccctcaccagaatcaagccatgctgacatctaaaatatccagctttcagaactgtgaaaaataaatttatgttatttgtaagccaccccatctatggtattttgttatagcgataggactaatatgatgtttttcaatgatatctactttttaatgttcactgattaacaaacaaataggaaaagaaaacaagcttaacatatgatatatgattctctacattttgctcccaaacttttctgaagtttcacacaatgtttcttctagtatggtaagattaaaaccatttgctattaatggttccagtgaatttccttagactcatcaaattcctttaaagtaatcacttatacatcatgatgttataaaatcaacttttcaaacagtgagtatttgtatacttaattttatttactggccatcacaattcttatatttataatatatcttttataaatattttttcctaataatcatgtttaaatccttcagtacagtccacaaaacacctacctgtttacatttcaaggcatgttttgttatttgtttgtttttgatttgtatgaatattttctcaattttaaatttatttaaatttagtgttatggcactaactaaataatattttattgaaactctgaatggatatagtaatattgacacatgtagaatgatatactttagttatcactgtgcagatataaatattcctgtgtgtgtgtattagtctgtcagagtgaaccactttgttttatgtacaagacagtagtctaatggcaaatgtttattctggtacaagtcctttgctggacaattttacttcagctttaatatatcagtatgactattcataatatgtagtaattttacaaatgtgcttgagtaggcagcaataattgctgcaatatgttgagaattaaattaactgaagataacaaaagtagcaggaagtaattaaaaaactggaacaagaatgaatggagatgttttcaaagtaccttatgaaatgtttagtagccagttcatttctgagagaaacacatattataattaagaaattattctgttccagatgtattgaaaatttttgcctttactaattattttggtgttaacaaacatataaaaataattagttggaacaaatatatctctggtatgcctgcgaaattcgggttctagggaggaataattaataattaacaaattcaataaatatttttattttgtatctactacatgtaaataaatagactaaattatttgaggaattaaagactggcaatacttggcctaaggaataatgctatttactagggaagataaaaggcacttaagcttgatgaaaatgacaaagtaggatgttgaatgataccaagatatcaagagaagattaaagaagggtatttcacggaaagaatataggaacatggcattgtgatttaaaaaaaaaagcaatgtgttcacagataccacattctttttcttccttggtacccaacacaagtaaagtatactccagcctcgtggcagttggatatgtccatattaccgagttttagcctggggacatttccagccccttgcataaaacttcccttctactcctctccatggcctttctggaatcgaaagactctgaagccacagaaaatagtggaactccattatggaaggatcttgattgcatgacgcctctgtttagtaaacatggtgtgataaatacccagtatagttatatgagtcagaaataaactgtgttaaaacactaatattggaaaggtaatttgttacaatatcagctgatttctaacaaaggaaatgtattcaatttcacacaaattcatacagatcatcggtaagatgaaggagtatagtgagaagtaaaaatggaaaaatgggaaagcagactgaaagctgatataaagagaaccatattcaggaaaaaagaattttaaaatttattttccagacaataagataatgtcagacaagttacgatgaaataggatgaatagaacttgtgtaaccaagaatactctggcagcaaaataaaggatggaggataaagagaagataacaggaacaagaaatcagcaagtagtccatgtttagaagaactaaattactttaattccacaaaatagaagtgtaggtttaaaatagggttagggataaagttaacaggctttttaaaaggtatttgataagtcaggcaaagcatgagcacccaagagttggtcaatgattccaggaggagcttagaaaaagacaatgagaaagcttaacagaataaacccccagcagggttgaaactggttttgctcagggatggcctgacaaagatattgacctttgattctcccaggctcacagtaaattttcagtactgtgtcaggattatgttatttatgccagttacttatgtgtgatgagtaggtaacatggccagaatctcaagtgtgcagtgactgacagactggccaaagtgagatcatcatgcatggtgcaagcctcatagtaaaaaattgcattttcttgtgggagactggaatctggatagttccaagaaattgaattcttattatcttgagtctagtgtgagtgaaaatctttgaatatcagtatcatttgtcattaaaaatatgtaactgtgccttttataaatcttttgatcacatcttgggaaatctacatagcaaaaagaataaacaacaaatcagtagaaagatgatgtttttagagaataatggagagtttacattgtcttcttatttatttattattttcttttaacttttaagttcaggggtacatgtgcaggtttgtcatataggtaagcttgagtcataggggtttgttgtacagattatttcatcacacagtgatatggtttggttctgtgtccccacccaaatttcatcttgaattgtaattcccatgtgtcaagggagggacctgtaatccccatatcttgagggagagaggtgattggatcataggagtgttttccccatgctgttcttgtgataatgatgcttttataagttctcatgagaaatgatggttttataagcatctgtcatttcccctgcttacacttctctctcctgccaccatgtgaagaagttccttgcttgcttttcaccttccaccatgattataagtttcctgaggcctccccagccatgtggaattgtgagtcaattaaacatctttcttttataaattatccagtcttgggtatttctttatattaagtcagtgtgaaaacagactgttacactcaggtattaagcctagtacccattggttatttttcctgatcctctccctcctcccatcctttgccctccaccctccaatagacagcagtgtgttttttgtttgtttgtttgtttttgagacggagtctccctctactgcctagggtggagtgcagtagtgaaatctcagctcactgcaacctctgcctactgggtccaagcgattctcctgcctcagcctcccgagtagctgggactacaggtgcatgtcaccacgcctggctagttttttgtatttttagtaaagacagggtttcaccatattggccaggctggtcccaatctcctgacctcgtgatccactcgcctgggccttccaaagtgctgggattacaggcgcagtctcagctcagaaactgtggcctttaaaaatatataacttttttttattctgtgaagtttcctctgaaacaagaagtttcttgtccctctttatatatacacctgcaatatttatcttctcatttctagcaggtcctttctccacatatgaatctatatttgcctttaatttcactctgcctatggacactttagtctaggcatatgaattatgcaagagtatcacttttcaaaatacataaaaacaagctatcctccccttggtctggcatctttcctacctccctgctaatcctctcatgcgcacttctagaaagactgctttatgcttgcctcctttacctccgcagatacagtaataacttttcaatgcattgttcttggcctttttattctctgtaaactgttcttgcaaatatatctgatatggtttggctctgtgtccccatccaaatctcatgttgaattgtatctcccaatgttggtggagggatctggtgggaagtgattgcattatgagggcagatttcgccatggtgttctcactatagtgatttcagtctcatgagatctgatggttcgaaaccgtgtggaactcccccctcgttctctctctctcctgccaccatgtgaagaatgtgcttgctgcggggagcggtggctcacgcctgtaatcccagcactttcggaggcgaggcgggtggatcaggaggtcaggagatcgagaccatcatagctaacacggtgaaactccgtctctactaaaaatacaaaaaattagccaggcgtggtggcgggcgcccgtagtcccagctactctggaggctgaggcagcagaatggcgtgaacccgggaggcggagcttgcagtgagccgagatcgagccactgcactccagcctgggcaacaaagccagactccgtctcaaaaaaaaaaagaaagaatgtgcttgcttcccctccgccctccaccatgattgtaagtttcctgaggcctctcagttatacttcctgttaagcctgtggaactgtgaatcaattaaacctctttcttcataaattactcagtttcagatagttctttatagcagtgtgaaaacagactaatacaatatccaacatcatacaaatttaaaaaacggaaattttcctgtcatacaattgtactttgctgataatatttaacactattagttgttttttaaactttgtttaaatctctacctttttttccaggtttcctaccctttccccttcacttaccgtgtgtgtttttaaattgaagttaaaagtagaaaagataaattgtgccttttaattgaaatattttgtttgttgacatatattgttttctttcttatatttgagtttatgtagaccgtttttctttactgtttgtctcaactcttttgttttttctttactatattacctcctttgggattaaccaagtttttttaattccaatttttccatttttcctatgttactatcaatatacattttttaactactgtattatcccagcaacatgaatctttgacatattatacccatgtataaataagaaaatttacaacttgtcagataatattatgaccttaaaacagtttactcctctcaccatttatgtgattttaaaaattaattttatttctctatgtatttaacacttacgggtgatcagctggttcttttcttcttaaatattaatttacttgtattgttaccatctctattgttctttatttctgtctacatacttatgcttccctccaggatcatgttccttctgcctaaagtggcacattaatattttttaaaaacaggtctactaggacatttttcagccttgtattataccatgctataaattttataatgagggagggccctttcctcttttagggagtggccaacatttaacgtatttcaggaaaacattaaaaattaaacaggacaagtacttgttttttttattttttattatactttaagttctagggtacatgtgcacaacgtgcaggtttgttacatatgtatacatgcgccatgttggtgtgctgcacccattaacttgtcatttacattaggtatgtctcctaatgctggacatgtacttgttgatggcttacttttatttccttaattttctttgcttttatgaaacaaccaacaactttcctctcatcctactcataacaactctccatttactagtatccactcacagagatcaaaatttgacatatcgacattatatttttgaccttggtattacttaggaaatgttttggtccactttggattgctaccaaatagagtggtgactaagttttagcacattttggatcttgacagtggcccagtgtagaggtggtgacctacttcccagcagggcagacttgaagtccagatgaatgactgtggtagatgatggctatgtggagtataagaagcaaacattcttagtatgcttttcttggagagaaaattgtgcagagaaaatacattttcctgatcctttcagaaaaattctacctctgaagggagtggaggttggagagtgaagaggttgaagtcttcccaagttcagtgttgtttttttctatgggtaactgtctttctcttacagtaaaatatatacataagttagataacacctatcagtaataccttagattatttctacaatgtaggctgcaaaacattaaagggtcaagcagttttcacattttaagcaatttacttttaattaacaaaaaatggttttacttatttacggtgtggcatgtgatgcttcaataaattgatgcactgtggaatgaccatatcaagctaacaaatttaacatatttattatctcacatatttaccattgttttttgcagtgagaaaacttttaaaatctcctctcagcaactttgaaatatataatacataaatatcaactctagtcccttcactgcgcaatagatcaccagaagttattcctctcatttaactgaaatttgtgtcttttgaacaaaattttcccttttcccatccatgtcctcctcatccctcaggctctggtaaccacaaatctactctctgcatttatgaattcaaatttttaattctgcatataagtgagatcatgtgataattgtttttctgtgtttggcttattttacttagcataatatcctccagatttgcttattttgttgcaaaccttaaaagcttaatagaattccatgctctctctgtctctctgtgtttgtgtgtgtgtgtgtatctatgtgtttctgtgtgtatcacattttaaaaatgtatttatctgctgatggatacttatgtttcttccaaatattgcctactgtgaataatactggagtgaatataggagtgcaaacatctcttcaccatacttatttcaattcatttgaatatacccaaaaacgggattgctggattagatggtaattctatttttctttttttgtgaaacttccataatatttttccaaagtatttttcaaaatgtagacagttatatataccaaaatatatgcatatatgagtagatatatacagcattgtgaaaaagagaacaaacatggagtgggatctatcttacttaatgttacaaaaaaaaagagaagaaggatttttctgaggaaataatgcctgttcctattttatgtagtaaatgaaagttcttcaggagaaaaaaaactgaaaaagagtaagtataaagcagttatgcccaaagaaataaaaatacaaaatagcctgtgttattccatttgtgtcactataaacaaatacagaggctggaaaatttataaagaaaagccatttaattggctcacattctgcaggcttctacaagaatagtgctggcatctgctcagctttgggtgagggtgtcagggagcttataatcatcacaggaagtgaagagagagccacggtctcacgtggaaagaggggagcaagagagagagcggggaggtgccacactcttttagacaatgagatctcatgtgaactccgagggagaactccctcattattgtgaggacagcgtcaagactcatgaatgatgtatccccatgacccacacacctcccaccagggcccatctctaacactggggatgagttttcaacatgaggtttgatttttcaacatatcctagccctacatgaagtttggcatgctctctgtatctctgggcaggtatacctttctctctgtcagagtgtcattttctatttccattctcaactcagaaagtgtggactttaaaaatatatctacttttttttgtctgtaaactttcccctgaaacaagaagtttcttttccctcttgatatatacacctgaaacatttatcttctcatttctagcaggtcctttctccacatatgaatctatatttgcctttaatttcactctgcctatggacactttagtctaagcatatgaattatacaagagtatcacttttcaaaatacataaaaacaaataagctatcctccccttggtctggcatcttttctacctccctgctaatcctctcatgcgcacttctagaaagactgctttatgcttgcctcctttacctccgcagatacagtaacttttcaatgcattgttcttggcctttttattttctgtaaagtgttcttgcaaatatacctgatatggtttggctctgtgtccccatccaaatctcatgttgaattgtatctcccaatgttggtggagggatctggtgagaagtgactgcattatgagggcagatttcgccatgctgttctcatgatagtgagtttagtctcaggagatctgatggtttaaaactgtatggaacttccccctcgttctttctctctctcctgccaccatgtgaagaatgtgcttgcttcccctccaccttacaccatgactgtaagtttcctgaggcctctcagttatgcttcctgttaagcctgtggaacggtgagccaattaaatctctttcttcataaattactcagtttcaggtagttctttatagcagtaatactctggggcatacctaagtctatatatataactaacatgctagaacaggtctagaattgctttggtagataaatgaataaattaatatagggtggacatttgcctttttttggtgaactttatactttgggcatatacaacattgcaatacaatttactaaagaaacaaatcatggtagatattcactttactaactttacttgtaattcaacaacaagcctatgatattttctttgtcagtcaaataaacccaccccaaattgagttatttgaaggagaatgaatcatgcagatgaatggtgtgttatatgtgtcatgagctaaatctcattttcagagataacattggcaatgaatctagggcagtctctaaaatccattgtctgttggcagtgctaactttgagttcttaaggtagtggaggttaaatatcctttggaccatgaattctttgcactatgataaaaggataaattaaatcctaatttggggagactattttgatgatatctattcaaattcatgtcttttgactcaacaagtacacacctatttgattgtattatagattttcttgctcattagccacaaataaaaataatttttgtttattgtttagcaggattctaaaaacagcacattggtgaaacagtggtaactatatattcataatacagaaaaatactatgggtctcacaatctgctatcaaaggtgtgtatttatctggagtctcaaatggcaaaataactcacttccaagctcgtgtaggctgttggtagaatttgttttcttgaagctctgtggctgagggctctggatccataaaggttgtcaaatggaggccacctttagtgcttagccatttattttttctgccacgtaacctttttcgtaagcagaccctcaccaaaacatctcagtttgcttcttaaagatcaacaggacaaggagagctagcagaacagttttacacagtgtaatgtaatcacagatgtgacattgctttatgtgtgtcatattctgttagttagaagcaagtcacaaatctagttcacattctaaagaaggggattacacaaaggctttaacaccaagagattgaaaaccttagggtctgtctgccacaacagaaagaatcaaatattaagagagaaaaatatgttccatttgcatatagcacagagtgcctaaagaaaatacagaaatgtgttaatatttatacaggatggtgatatatataacttagtaagtaaaaatctgtaccaattgcattgcattttcaagggagtcttaaataacataaaacatttgatgactaagtactaatgaagtagtattccttgactgtgactttgtgccaataataaaatattcctttctctaggctaatttattacttatttttataataaaatatattctgtgtaatcaaattgaaaacacatattttcaaactagtgatatgagtggatatggtgacattttaatggaggttaccatgctttatataatttaaccgaggatataatcttattatttgcattacaacaccaatctcagtccaataattatggagtggcattatttgtacacctccagattgtcactgtttaacccctctgatgaagtaatcaagtgtctggttttcaatattgtttaaaatactcttaatgtctctagatagtggaaattaggttaagctgaagcatcttaaagcttcataacaccaaacagatgttcttaaagcttcataacatcttaaagcttcttaacaccaaacactatgatcaggaggtagtggttcatttccaccctatttcctcttacctttcatgaactccattcaaacatatgcatgttgctgagatatagtatggtgcttaatatcgctggggaaggaaatagaaaaataataactacattgcattgaaatatgtgcaagtaatagtgttctaataaaggtgtaatatattttgttgaatatagaaaaattgtgtagtgtaaaacattttccaaactttctgtctattgtattatatttgtaagatttaaactgatgctccttagactgtaaaacaaatactgcctttcaaaaataactaaaataattagattgtgttttcagatgaattttctggtgctcatataattaaaaaatagtccaatagaataagaacttccaactgaaaaagaataaaggcattgcctattggagtaacatatatacagctgtctcttgagtaaaatactggaaaataaagatgcaagtacctcaatgacataatacctaacattttctagcacattataaaatgtagtctacaattacgtgtattattatttatctcctgcaataatgtaagctttgtaaatgtagaaatttctgtctatattgttctctgatataaaactactgtttagagtagtgctgaatacagggtatatatatatatgtaacttttcctaaaatttctagatagttgcaaactttacagttttaatagtttgttttttaaaaagcataatttacaaagcatacatgtatgcccttccttccttccctttcttccttcctttccttccttctttccttccttcctccctccctgctcgcttgctttctctcttttcttttcattttctttccttccttccttccctccccctccctcccttcattccttccttctctctctctctctctctctctctctccttttatttattttttttttgtgagacagggtctcattctgtcacccaggctagagtgccatggtgccatcttggctcactgtaacctccacctcccaggctcaagcaatcctcacacctcagcctcctgagtagcctcctgagtagccggaactagaggagtgtgtcatcacgctggctaattcttgtaatttcggctggtctcgaactcctgggctcaagcaatccacctgcctctgcctcccaaagtgctgggataacatgtgtgaaccatcgtgcccagcccagcacgtattctttttaaatacagcccaggttttcccatctacagttatttgatgttatgacttgttcaaataatcaagttattcttaaattttgttttctttttcatctaagcaaaagtttatggatgttatatcaactacatttcatgtggggcatgcttcactactatatatatttattggtaattgggcgacagagtgagacttcatcacacaaaaaaatctaaatctttagtagtgtaatttaaaaacaagaattttatttccacaccagcttgaagtctgtggttttaaaacaatttctttttaaggtgtgctttacctcaaaactgggagagtctgtcttttatctcaaacaaaactacatggagaaaaggtactaaagaaagacaaatgcattagataaatattttaccgtatagttgtcagtaaaccaacttagaattatcctgcagggattacataaataaataaatacataaataaacaaacaaaataaacacctttatgaacactccgactgagtggaatatgtctatattcttataactgcttcagttctaaaagccggagacacaggaatcattaagaggggttgagtcaagatggcggcctggaagtagctcctgcgcgctgctctcacagggaggagacaaagggctggtgaacactgaccctacaagctgatatctaagaaaccgtgtcggactcgatcaaggcagcaagccgacacagagaacagagaggagtgcagctgggcagcagcctgtctgggataaacgcggagccaggagaagctccccaacacaggaaagggtgagtgagtaagaggcccctgagggcttcacactctccgcgggaacctgtgtaaggttgcgaatggaagacccccaccaccgccccccttccccccgccggcctccctgcaccctccccccagcttctaaactgaggcagagagccaccggaaatgttgcagcggcagctctcaagtccaaggggacctccacaagccttggaccctggaacagaggcaccagtgccatctccccagtagagactgcagtcacagtgcccaggagcagcaggattgttcccctccctccagccgccagccgcccctccaccctacacatgcacagggttcagcgccagcttccaggccagcagccccacgtatgcctgaacttagctggtgggcgcaaccacttgttccaggaaacatccctcagagagcagacagtgaggtagtcaggcaacgcccgctagagctcccagcccagctttcctgcccctgagtgaattcatccggcaggtgcagtctcttgttgtcccaggaaatccctgaatatcaggaggggatgactccgaccaaccccacctctcctagccaagcaagccacgcctgctagagcttccagcctaagggccttaactctccctgaaatctgctgagcagcacagcctcctatagccctgggaaatacccagagggcagggtgaacagctccacccatccccgtctttagcagacgaatggaccacactcactagagcttccagcccagcaatcttgcttctgcctgaatttgcatgcgcaaccctgtgttctcctgggaagcacccggacagcagattaggtgacccccacccacaacacccctgcagatcccagccaacgaggacttgttggcttgggcagtacccaggcagagagaagccctaactttcagatcactgagaggtgaggtgcccagctttgcaggctggttgaggagcaagcatgtgtctccctcccagcatccaatgggtaaggatatgacttgtctgccaaccaacctctgccttagtgaaccccgtgggccagaaaacctagcaaaataaacctaggcacagagtcagtaatcggaggagattcctccaaggcccagaagcggactacgtgagggagtcatcactctcttcccctacaccacagaactctactgaccaactgcagaggaagagcctctctgctgcctaacattcccatgtctttggcttgtgttctcattcctttcacatttttattttttttattttttatttttattattatactttaagttctgggatacgtgtgcagaacgtgcaggtttgttacataggtatacacttgccatggtggtttgctgcatccatcaacccgtcatctacattaggtatttggcctaatgctatccctccctagccccccaccgccaaacaggccccaatgtgtaatgttcctcttcctgtgtccacgtattctcattgttcaactcccacttatgagtgagaacatgccgtgtttcattttctgttcccacgttagtttgttgagaatgatggtttccagcttcatccaggtccctgcaaaggacatgagctcacccttttttatggctgtatagtattccatggtgtatatgtctcacattttctttaaccagtctatcattgatgggcatttaggttggttccaagtctttgcttttgtgaacagagctgcaatcaacatacgtgtacctgtgtctttacaataaaatgatttaaaatcctttgggtatatacccagtaaggggattgtgggtcaaacggtatttctgtttctagatccttgaggaattgccacactgtcttctacaatggtttaactaatttacactcccaccaacagtataaaactgttatttctccatatcctctccagcatctgttgttttctgactttttaatgattgccattctaactggcatgagatagtatgtcattgtgcttttaatttgcatttctctaatgaccagtgatggtgagctttttttcatctgtttgttgtccacataaatgtcttcttttgagaagtgtctgttcatatccttctcccactttttgatggtgttgtttgtttcttcttataaatttgtttaagttctttgcagattctggatactagccctttgtcagatggatagattgcaaaaattttctcctattctgtaggttgcctattcactatgatgatagtttcttttgctgtgcagaaactctttagcttaattagatcccatttgtcaattttggcttttgatgcccatgcctatgtcctgaatggtattgcctaggttttcttatagggtttttatggttttaggtcttacatgaaagtctttaatctatcatgagttattttttgtataaggcataaggaagaggtccagtttcagttttctgcatatggctagccagttttcccaacaccatttattaaatagggaatcctttcccaattgcttgtttttgtcaggtttgtcaaagatcagatggttgtagatgtgggacgttatttctgaggactctgttctgttccattggtctatatatctgttttggtactagtaccatgctgttgtggttactgtagccttggagtatagtttgaagtcatgatcaagttggcttcatccctgggatgcagggctggttcaacatatgcaaatcaataaatgtaatccatcacataaacagaaccaatgacaaaaaccacatgattatctaaataggtgcagaaaaggccttcgacaaaattctacagcccttcgtgctaaaaactttcaataaactaggtattgaaagaatgtatctcaaaataacaagagctatttataacaaatccacagccaatatcatactgaatgggcaaaagctggaaacattctctttgaaaaccggcacaagacaaggatgccctctctcacctctcctattcaacatagtattggaagttctggccagggcaatcaggcaagagaaagaaataaagggtattcaaataggaagagaggaagtcaaatggtctctgtttgcagatgacatgattttatatttagaacacccccatcgcctcagccccaaatctccttaagctgataagcaacttcagcaaagtctcagggtacaaaatcaatgtcaaaaatcacgagcattcgtatacaccaataatagacaaacagagagccaaatcatgagtgaactcccattcacaattgctacagggagaataaaatacataggaatacaacttagaagggatgtgaaggacttcttcaaggagaactagaaaccactgctaaagaaaataacagaggacacaaatggaaaaacattccatgcttatggataggaagaatcaatatcgtgaaaatggccatactgcccaaagtaacttatagattcagcgctatccccatcaagctaccattgactttcttcacataattagaaaaacaactactttaaatttcatatggaaccaaaaaagagcctatatgtttacaatataggctaagacaatcctaagcaaaaagaacaaagctggaggcatcccttgacatttttatttgcagagcataagtgtttaattttaatcaaatctaaataatcgattattttttttcatggagcatgcttttggagtagtttctgaaaagtcactgccatgccacaactgatagagtttctctatgctatcctctaggagatttattgtcttgtgttttacatttaggtgtgtgaaaaatacatctagaggtaatttttgtgaaaggtgtatggtctgtgtctagattaatatttttgcgtgtgaaggtctagttgttccatcaccatttattgaaaagattaccctttcatcacttttattacttttgctccattgtcagatatcagttgatgatatttgtatggtttcatttttgggctattatgttccattgatatatttgtccattctttcaccaattccacactgtcatgattactttagtttaataatgaatcttaaagttaggtaatgccagtcttccaactttgttctcctttaataatttgccatctaactttcctcttttgtctctcaatacaagctgaagaatcagtttgtgatacccacaaagagcctgctacgatttctattgggatggcactcaatcaagttgagaagaactgacatcttaacaatattgagttgtcctatccattcacatggaatagctctctgcttatttagtttttctataatgaattttatcagagttatgtagttttcttcgtatagatcttgtacatttcttaaacttatatatgcataaggatttattttggggaggtacaaaagtaaatggtattttatttttattcttaaattgcacttgttcatttccggtaaataggaaagcagttggcctttgtatattaatcacgtaccctgcaaccttgctataatcacttattagtttcaggagtcttttgactgttcttttatattttctacatagataataatgtcgtctacatctgaagatagttttctttctttccaatctgtaactatatgtcttgtcttgtcttatcggattagtgagggcttccggtatgatgttgtaaagaagcggtaaatggacatccttgccttgttattgatctcagcagcaagtctgtgtgtatttttcaaaattctttgtatctgaattttggaagaaaaaactttgaagcttccacataggttttagtcactgaataaagttgtattttgtactgcaataaattaaataggttactaaaagcttgcaatttatatcaaatctagtgatagctaacttttacatagtgcttactatatgccaaaaaatcttcttaaagattcacatgtactgattcatttaatattgtgttattatttttctagtaatcaggtaagacaccaggagcaggtggaggtttagtaagttgcacagccactttgctacagagccagcttgcagaatcagggagtctggaaacaaagtctatgtgcttgactatgagattatagactatcacatcaaaatttctgccttccagtgttttgtaatgtattcataaagttaatgtatgtaaaaattaaaggattttaatatgattttgttaataaataacaatagttaatgctgtaagaatttcaacatggataaaacatactttataccattcaatagaaagatgtagattagtcattacatttgagggagtgggaaaagaagaagagaaagtattgatgagcaggttctacattatgaactaagaagagttagatggataatggggtaaatcattagaaaacagatgaattgttcaaatggtgtaaggacgagataatattaactgtatcatttttattgagataaatagagataaatatctatatactttgggattgtgattggtatttttaaaacacaaaataaaagacacaaaagtcaatggtaaaagtttatccctctgacttcattttcaaatactttaatttacgtgtattaattaaaattataaatataatagcaaaattataaatagagaaaaatactagcagcatatgttacaaaaggttaatatcatttatttatacataattaaaataataagccaataaaaatgaagatcaacatagcaatggaaaaataatcaaaacctaccaacattatgtattgttgaattacatagaatttaaaaagaaaaaaattaaatttacttttcagttaaatctaaacttgtttcttagaatataggaaaataactttgttattttacaccataactaaaagtatatatatatatagcagtgatatcaatacaagtttcacagaattatcttttcagataaataaatgcctccagtataagctaacagatatttaaggttaaagttattcagaatttttgtttaatatagatgtttaaaaatatacttagcatgtgtaagatttccaaagaggtagcattcttaagaattatgtaaacactgaaaatcattaaataattcaggttcctagttatgcaacctagaacaagatacttaaactttttgcttcaattgcaactgcaaaataagtatatagtaattatatgagtatgtagtaattcccatttcaaagatttgttgtaagatttgtgttttaatatgtataaagtttttaggacaatggttagcactagttacctattcaagaattacctgttatcttatggcatatttgttacatttaaaaatgattagtattgtaattagttattttaggaagtcagaacagccaacatagagtgagatgaaaggaataagtctttttgtgtttcagtttgtccacatacacaacaaagttttttcctacaaatcatttatgaatttgtcctttcctatttaaacttccattaacctccaggctgaagtccaagccccttcccttggcctcctccaaatagcatcaatatttcagtatcactttatctcctatcatttatttctccttacctttggcaatatccataggacatttctcatgttccccagatttatcacattctttaaaactctatgcttctccaatactatttattctatttgtaatacttttttttctagatcatattctccacttaaaagtctatttgcccttaaagacatagattttatgccatctcttctgagaagtcacatattgcttccattcaggttaaatcttttctcctatagattgtaaacaccgtaagaacctgtgatggcctgatttgcattttcactttgtgtctgcattatcctttgaacatctccaatcgtgatttgtttcaaaatgtttgatttttaaattttattttatttattcataataacaaaataaaattataatcagtaatataatttctaaatgaataatattaaaattaaaactgatccatttagctgggcatggtggctcacgcctttaatcctggcactttgagaggctgaggcaagtggattgcctgaactcaggagtttgagaccagcctgggcaacatggtgaaatcccatctctactaaaaatacaaaaaattagctgggcatggtggtgtgcgcctgtaatcccagctactcgggaggctgaggcatgagaattccttggacctgggagcggagcttgcagtgagccgatactgtgccaccgcactccaggctgggtgacagagtgagactctttcacaaaaaaaaaaaaaaaaaaaaagaaaaaattgattcatttaacaagatgagtaatttaagaattttataatttaaataaacatctgtggggtatgacaattaaaataacttcttaatatatttatcaatcgggtaatgtaactatgaaatttttagtctaacattcttcagtattcttcagtttttttggagattttattaccatattacagctatctatgcaataagaaaaagatggagaaaagttaaatgttattataagattattgatgtggagatttaaacctttgatggacaaaagtacacacaatttttgtaatacagaacatttgaaataatcactgaggccactcatatattgtaacacattttccttccctatggccctcaaagtaacaatattaataactaaatttatcttccatttgaatgtggaatatagacattacctccaaggtaatgtgcttcatgacagtgttaagagaacaaagatgatacaacattgcataaccaaatacaggtcagaatttgtttaagtgtgaagagattaaatgatagctaaagaaaaaccagttaggtaccaaacatagtaatctagaattgaattactttgtgaaatgaaaatatccttgtggaatgcttgagatcatagtgcagtaaagcaaaatcataagcttctcagtcaattatgtaataaatgtgaatgattgctaatccctagaatacagaattttggggatatgtttcatgacacatgtggaaggtttgtttttttaactgcaataatcaaataagtttgcaagatataagtgcaataaataatatttagagaaagaaaatatggtgtaaccgtgtgaaattttaagcatatgacaaacgtaatttttgtgatcctgattagaaactatactgaagctgctaaataataacatgatcacatagaaaattacaaatatgagacgataaagtggaaatgatgtattagttttcagattctactataaataacccttatgttttatttgtataataataaatcccaagacaggaaagctgtgaggattataaaaaaaaaaaaaatctgtgatagagagcccagcatggatccaaaagcatctgaactggacctttttaaatatataaaatataggttgttatttcttttgacaagagcatattggtgtcataataaataagatcaaggttagaaatcagtatgggctcccagctgaatgactttcactgttaatattttcagaatgagaacagtttgtgcctgagcttaaatagtgtgtttctttcttgccattgcttgaagtgtcataaatagctgtagtggcaaacaccacaaaggaagctgagaggaagctgttaacgcttcattattggagggggtggtaaaaagggagtaagggagtggcactctatgtttcagcctagtgaaattaatctaacagattttaaacaaaataaaatatattctgcttaatatattaatagaattaatatatcaaatagttttatacaataataaacttttacagtatcactaaagggaaaaatcaatcctaacattaaagaaaatcaaggcattctgcacattgctccacacctatagaaaacttggagaaattatgcataggattgctaatgaagggccacaaaaatgaaatgagatttttgactctttttgaaataattcagattttcagtctgtattaaaatatggaaattctggcacaaaatacaataaacactgagagacagttatattgagaattttcaaggaactacttcttaatgtatagcatgttatgatttcaaagtcatgattctttttattcataatgactggtttaagccttcattttctttccagattctctttcgaaagcttaaattagatagaaagaaacattgaaacctgaagaactgttatactttctaggagtagatacttttgtaccattaaaatctttgagtttgtggctcttcaagaaagtggaagatctcttcatgtgctacaaagcctgtttttgtgtctgttttttctgtttcctttgacattcttttaaaatacaatgtaagacatacatttaatatatggaaatttgatcatctgcataaatgaaattacaactttaatacatattaaaatgccatacagagtgtatttaaattttgtttctgccatgggagtgtatagagcgagttttcggtaatttaataaggtccaggaacaactctgtaagtggaattgaccctttttcagtattgccatatcaataattgaatagaattacacttaagaatataaaaatgcttaggcacactcataaccaaatgatcataatctggatgctttgtttaaattatgtgatgaatgggagaaattgtagtatttctgtcagacagatttcaaaaagtgtaattgctggaacaaaggaaatatgaatactttaaggctgacactgccaaattaatctccaaatgtttatactgatgtagggcaggtgagccccaaagtggagcttaacccatgaaggttcttggctttgccccataaagaattcaagggtgagtcagtggtgaaagaaaacagctttattgaagcagcagtgttaagcttcaggggtgttgaagctctggccgtgttactgctccatgactgctcctgcagactagggataccccataggcagtttgctgcaagtggcactctagggcaactttgcagtcatgtttatacctgcttttaattacatgtagaataagaggcagttgatgcagaaattgccagggaaagggtggtaaacttcaggttgtgggaccattgccatggaaaggggcggtaactcctgggcattgctatggcaatggtaaactgatgtggcacactggtgggtgtgtcttatagaaagctgcttacaaccaggcactgttttagctagtcctcaatttggtccagtgtttgagtcccaaatcccacctcagtacaaccttacaacggaaacaatcatacacgaaaatactgattctttccttcatgaccagttctgaattttatgggagcccatcatattcccaaaagacacaatcctgaatactgtaattccctatgttgaaattccaaaagatcaaaattctgaaaataccatgttagaaaaattaataagaattatttaaaatatctttattttcatttttaaatgggatttatttgggaaacatataaaacatgacagaactcttcataggccattttacacaataaaataggcaataataactttatattttgtaagcatacttagttatacaaatgaaagtcacatgcctataagttatgagcagacaaatcatattaataaagaaataggtcaaaaagcaaattatataaatgtatgtcactatggttggtaatcatgtgcatccagctatattcagatgactgatctgaaatgtgataaacaatgtaaaggtctttgatggcatcatcaataaccatgatgggtcacaatcacatatgccatcatctgaagagtctagatcttgagaagttttatctttcaagaatgcacatgtacaaaaaggacatatcttcatttattgagaatgattcaacatttttatgtacacacacacaatgcttacacacaaagtcaatattgtgataagacacttttccagagtcaaatttgtgaaaattgcataaagcgagttaaaactctctgaaagcctctacagaatttatacctgcagtactggaaatgatgcaaagatgaaatacataccattgtgaattgctaaaaaatttaaaaataaataaaaacaggttcatgcttgcaatttccaatgctttgggaggccaagggaggaggatcgtttgagtccaggagttagagaccagcctagggaacataacaagaccttgtctctaaaacaataaaaataatgaaaaattagccaggtgtggtagtgtgtgcccgtagttccagctacttgggtggctgaggtgggaagattgcttgaacacaggaggtcaaggctacagtgggactcgatggtggtgccactgcactccagtctgggcgacagaatgaaatcctgtctcagaaagcaaataaaccaaaatgctaacaatttaaaatagtggggaaaaaaaaacttaaaaaccgaaaagaaaattctacatatgaaaagaagtgtattacaaggaaagatcatggacaattacacaaagtccctaagacctgactaactttcatgatgaccaactctattttgaagttttgcttcatgatgaatagctgcttttattttttagtcttttagaacagtgctctccttacagaatacatttacattcattttctagttggcattgctctttttaaaattcagttatgattttatatacaccaacatatacattctctatgaagtatttccatggctctgtgttgtttgatgacacacagaaatccattctgctttgcactcatatagagcacaggtttgacagaaacagtgctggtgattggatagcagtgccattgcctaagtgtcttcttattttgccaagcacataattattttcaaaccagtcagtaagttgagtggcttcttcaggcaaatgaagctttgaaagttcctagaatgtcttcagctggaaggaattccaatgcaggcaaatgacacagttttaagctaaggttttcattgttgtgatatttgtgtggctcatccacccatctacattttctgccaaatgtattgggctgaatggaggaaaactaacgttattggtaacactttgaaatccacttttaaaatccttgaccacgcccaattccaaatctgtcatgatggtgtgggattcaaatgaaatgcattttcttctgtaaagtccaccagatcttcaaataagcatttataaagtgcttcatttgttccagtcattaatacataaacaagcaaataagttatagaatttgtggatccaacaggggcatgacttgtatatagttgattaaaaaaacagtggggacagtttagaaagtgccatcccttagcctgagtgaagcatttgccagtttttctatgttagatttaatattaagtacaaaaactctatattcgaccaggcgcggtggctcccacctgtaatcccagcactttggaaggccaaggcgggcggatcacctgaggtcctgaggatttctagaccagccaggtcaacatggcgaaactctgtctctactaaaaatacaaaaattagccgggcgtggtgctacgcgcctgtaatcccagctgctggggaggctgaggcaggagaatcacttgaacccggaaggcggaggttgcagtgagccgagatcaagccactacactccagtctgggtgacagagtcttgctctgtcacaaacaaacaaacaaacaaacaaacctctttctttttcaacagtcaattctgtaatcaagaatagttcactgttcctgtgttagtatgctaaggatactggtctccagctccatccatgtgcctgcaaaggacatgatctcattcttttatggatacatagcgtaccatggtgcatatgtaccacattttcttttgatgagaacacatggacacatagatgagaacaacacacaccagggcctttcagaagctggagggtgggaggaaggacaggattaggaaaaataactaggggtactaggcttactatctggatgatgaaataatctgtacaacaggccctcatgacacacctttacctatgtaacaaacgttgacttgtacccctgaacttaaaagttaaaaaaaaaaaaaagaatagttcatggctatgcaaagtggctcaagccttttatcccaccactgggaggctgaggtgggagaatcccttgatcccaggagtctcagaccacactgggcaacatggcaaaaccccaactccacaaaatatgaaaatattagccgtgcatggtggctcgcgcctgtagtctcagctaattgggagtctgaggtgggaggatcacttgattcccagaggtcaaagctgctgtgagatgtgatcatgccactgtgctatagcctgttcaacagagcgagactctgcctcaaagaaggaatagttgttcatttaatgtgttttgtcactgaaggaacctcaatatctgaaagtgtcttcagttcacaacgtcactgagcttgttaaattctttttattctctgacaaagagagttttggaaggcaagcatggttctatgttaagaggcagaaggtgtacacgattgaataatttggcaggggagatttcttgtatttttctccggtgtttttacttttatgatcttcaaagcactctgcacttgtattgaagggtggctgtggtctacacagtttgtaagtaatttattgtccatctgaaagtctggttattacttggccattgcattaagcaattttctgctttttcagtaccaataataatcagcttttagactttatctttcatcattaagtagcctcgtatacttacttatcacagccttttggtgagggaacaatttcactgttctctcctattgtgtggtaaggaatacagtaagaagaaatgatagttaatttcctccaatgccaaatatgtattaatcagggtgtaccagagacacagaacgaataggatatgtatatagatatatgaaagaagactccacaagttggacacccttggatgctggtagtgtggctctgcataaaatccttgagacccgaggggccactggcataagtcctagagtccaaagaccagtgagcctggagttctgatgtgcaggcagaaaaaggaaagtctgtcccagctctcagacagagacgtgttcaccttctatatttgttctcccggggccccccgctgactggattttccccacccagttcactcagactcacccactaatctcctctggaaacatcctagcagacactcaaaataatactttatcaggtttcctgataaaagcctcaagccagtcacgttgactcctaaaatcaaatccaccccttgtcaatttggcagctatatgcatctctttaaaacatacttaattcccaaataaagacaataacaaaggaatcgtctgtctaacatgatgcaattatcctgcgattgtgattttcagaatttcagaccttaggaattttagaccttaggaattttaaactttagagctttaaactttagggattttaatcttaaaatatttcagcattcaagtttgtgacatttggaattgtgtccgttagaattatgactcaaacctagattttatagactttttataggtcagaattttatttttgtcaaaaataatgaaaaggcatatcacaatattgctttaatttacattacttttagaaaaacagcatccttggaattttagacaattttttaaaactgtgaaatgcctatttatatattttgcctatatttcctttggttgtttgttattatagataataggagggagacattgtattttaataatattaacacatttgttttattaatcacaagaggacttcattagtaatttatttggtttttaacttttttaagtgaaaaaaatcgttattttgtagtctactgtactatcttctgcatcttcaaaaattaaaatttaacaaacgattttatcttaaagttagatctagtttattcactttctacaaaaaatatatattgacagaatgtcaacctagcaatgaaaaggttttgaagaaacaaagaaactgtatgtgaatttgatgttttaaaagcccatactttttagcttaacaatttttgtggcagtttcataataagccatacttttttggctgataagttagaaaatcacacagatgatagcatatttcaatagcacataagatacgctcaccctactttactgaagtgacgcaagctgtcattctatgtatttttcctgataacttcttaaagaatgttatgttttttcccccacggtacataccaggatttattttgcacagaatactgaaaaaaatgttttcagctctgttcaatgtttattttttgtgtaggcagttcttggcatttacagtctgatttttaaggtgggattgagttttaaaagtacgtggaaaggcttgaaagactaaaaacagatatctgtgaattctaaatcctaaaatatgagtcattaattcaaagtcatgaaaatgctatacatggaaatttctgataaaaactttagtgtgaaacagatacacaatcaggtaaaatgatccaatgtttggtggtaaaacatctcctacatgtaatagcattacacagtaagtatgataatgtttatatatgtgcattaaggggtatattgagttgagacataaatcagaaaccaattctcccagacaaaatatatctcaatctaatacctgaccttatattggtgactaggcatttctgtctcaccaagaaatgtggatgttgcagattcagtcactagctcaaaggtggtctttcttggaacctttgttacttggctctttgagtgtcctcaagctgtctctaaatataagcttaagtttcaggctgaagtcccacacagaccacaacactatatcttatttttttagtttgttgaaatatagattttgctgatttttaaaaagtctgcgtgcagaaagaaaacatggcaacaattccaagcttgagttctgaacacatctagtgctctatttatacatgtatacagttcaagatatcctaccaatccagtaattgttcttatattaaaacaaacttcagaaaagcaataatatatgtttagaaaacaaatccactacatactttaaaaccagaagagttagtaacaaaataaggtgtatgtatgaaaggagaagcacataaacattttaaataaaggagaggcacaatattcattttgaagaacaaatgagactatgacattgaggcagtaaattaaatttttttgctcgttaattatttaaattttagaatgtattatgtgaagttatgtggattatgctagctgctttcatcatagcactctttctgtggctgtacaaatctaaactttcatacctatatatttatgaggctgaacgtatacctttccaaatattcccttttaaaaaactttttttgccatcattgttaagagacacttgaaagaaatgaacgtgatgagagccaggtaaggagcagtaaactacaaataaaaacaaaataaaactttatggatcctattgccaatgttaggtcagtagttttctaactcatgccagatgaccttcagttgtgtcttgggtactctcattattttttatgacttcactgtggtgtttactcaaccaggaatagtcactacaagctaaaccattttgaaatttctaagtaaaagttatggagtgatgaaaatttgggggttttcttcccaacttttgattataagtggtatgtatgatttgtggacaattcagacccatcttattttgatgtggttatcgtttttctatggatgtctgatggattgtagaacaatttgtagtaagatgcatgtatgtgcatgaaggttgttcagaaatttccacaaggcactaggtaataagcaatgctttctctataatccctttccatagatccagtcttccaaatagatagagcctaggggatatcaagttcagtatggacccagaagccactgttaagctaacaaggaaacttagaatagaggtgaatatttgacagtgtcggcaaaatattctccaggttttgaaatcttcatcagccctctcatgctaatttcctgtaacctgtacaccacagtcctataaattgcagactataaaatcagaagaattggaagggtctcaggtcacctatttttgtggcaatttgatgtcaaagtgtttgtcagttcaaggaggaattacttagccaaattttctcattttgagttacatacttcacctgactcttctgtggaggactagaagtctgcaattaccatttaagttgataagttctaaaatatgtaatgtattttccacatctttgtgtttgaggatgtcctaagacatgcagttttcaaaacattgcaaccaaaagaattgcgcatttattgatgttcaaagttacataaaattatgtgtaattaaatttggatattttatatgtctttgagaagagaaaattcctactaaatggtatgtttaatttattgttttcaaagttgataaaataaatgggtaaataatatcaagaagattgaataacaaaactcaacagaaacattctgttgtattcacaatgactatatgttaacttttcctttttatatcattatagactcatgactttttagaattactgtatatcattgatctcagccaatactccccttttcatgctcatgtctctcagcttatccagtgacagcccactttagattggcttctttgtccttttgatgcagttccattaagtcttggaagctgctttctttctgatacaacaaaatgttcaaaaatcaatttgtctcaactccagacataaaatcagccattttttcaaggagaaccagtttcttttaatagaacttgtattagagatataaatctgagatctaaggtagcttgtgataaaaatattagtatactttccatttcagtgacacatatacagaaagtatatctttatactttctaaaattttatttaaatgtgaatttatagatgaattcatattactttttgtgattttcactgtgattgtagtaggaaagttgttttattgaatttttttcttacactgaaattctgaattcttaaaatataattacttttttgcactagcagattttacaagtaaattgttgcaaaataacaatacattattaataatactatacaattactgaatttcaaaatattctagtggtttatttagtttatagagtttatgctattaaatatgtgaagtcaaatttcttctagaatcgcttatactttctcagtctttgtggctatttaaatatttattgatgaatcttgttagttattctagattaggtcaattgtttcaatttgattttcatatgagagttctggcattctacatctcacatttctaaatttctagagggttgaggtttttcttgtggcaatttttatttactagaaggcagaaaagttggttcaaacctgagaaaggagaaaagaacattttaaataggccattctctaacattttaagattccatttgatttatcttaacactaaatacgatgacttactactgtaagtacccctttgtaatcatgctttctggaagaataaacaaattttgcctactactgttcaatttcatgtaatatcagaatccatacacttaattattgacaattattgttctgattttctaacatatgagtaaaacatatttttaaaaattatgatacactgatcatgttttaaaattctcattatatatttctaaatatagtatttgaattttaaaaggcatttaattaaaaaattggaataagtagtttttctaggttgaaaaaagcactggcattctaaatttagtcaaacaaagaaaatacagatttatcctttgctctaccttcttcataattcccctgcaaactgtctagaaactggaatttaacattcaaagaaattctaaacccataaatttagagccaaacttcatgtaaattccttattaggtatcacattcttattatccggtttgttttttgagcttaaaactacaaaaaaggaattattggttggaaatatgtttaatcatatgtatcttatattttcatatccagatataaacatttattctgtatttctgattaaagtaaactgcaatgcataattgaaatttagatttaaaaacacaacttttactacaataccaccacaaaacatgaaatgcttagatataaatctaacaacatatgtacatgatttatgtgagaaaaactgcaaaactctgatgaaggaaattaaagaagaactaaatcaatagtctgtgttaatggatagaaagactcaatattgtcaagatgtcagttcttcccaacttgatctagagattcaatgcaatcttaaacaagatctcagaaagtaattttgtggatacaagcaaattcattctaaagtttatataaaaaggcaaaaacccaaaattgacaatgcaatgttgaattagaacaaagtgggaagattgacgctacccaaattcaaggttaattatggaactacagaaattaatactgtgtggtattggtgaagggatagtcagagcaatgaactatttagacagtcctcagaataaacatataaatctagtcaacttatctttggcaaaggggcaaatgcagcctaatagaccaatgataatcttgaaacaaatagtgctggaacaattgaacatcagcatgtaaaacatgaatgtagacgcagatttaatacttttcacaaaatttaacgcaaaatgcagccattttgaagacagcttggtggtttctaatgactaaaatccacaacactggcaagacaaaatgttagtgaggatgtggaacatcgatttttatttattgcttctggaaatgaacaatggtacagacactttagaagatagtttggtggtgtcttacaaagctaagcatactctttccatatgatccagcaatctcactctttagtatttgcaaaataagttgaaagtttatgtctacacacaaatctacatgctggatatttatagcaactttatttataattgccaaaacttgaatataaccaagatgtccttttgtaagtgaatgaataaataaactgtggcacatccagacaatgaaatattatttggcactaaaatgaaataagctatcaagtcataagaagacatggtggaaactcaaatgcatattcctaggtgaaagaagccaatctaaaaatgctatatactgtatgattccaactacatgacatgctggataaggcaaagctctgaagacagtcaaaaaagatcaatggttgccaggggttcaggggatggaatgaagaagtgaagcacaatgagaatattttgtaaaataccctaatgatagacacacataattatacacttgccccaaaccgtataaaatgtgcaatacggagagtgaacctaatgtatccatgaactttaggtggttataatgcgttactgtaggttcatcagttgtaacacatgtaccactctgatagaggatgttcgtaatgggggaagctgtccatgagtgagggcgggagtatatggaaatctttgttcctttctctgaattttgctgtgaacctaaaactgctctaaaaaaaaataaactcttaaaaacattagcccatactcaatatatatattttgtatatatatttactgtatcatatattatatgcatttgtatttttaaggatacatttatgcaacatccatcacaaagtgatagattcatcaaaaaatcttcatttctctatttgaagcctggtttaatcatgaatattatcaatgagtacttgtcacttaaaaacaattttttaagatcaatatgtgttcctcaattagtcttggcattcagatcattcttcacttgaaggattaaaaaactggataaattttaattgtggctttgaaaaaactttacttataaatttactgcagcttgatgaattttattgtcatttgttgcatcatttcttcgtgaatcttgactatatcagccactagatttccgatatttgtattgcagtagtgaaagcttaaagcattatgatgtttttcttataaaatacagtgtactatttaaatcttaaatattccttctgtatttctgatgtatttccttagaatttaaaaaaaattctgtcaatttctgtttttttaaattcatatttcctcatatttgtacatattcttttatcatttattatattttatctactaaaccttatccagcttgattcacccagcatttgtggttcagatctggtcaaacagaagtgctttgaatccaatatgactgtaatttactggaattgtacaccctgagtcaggatttagagctcagtattcttatcttgactgtttttgaatccagtgaaaacatcaagggttctctcctggtgtttttagtgaaaggttcacttttataactccctattattgtagaagattgttaaagctcatactgaattggaaatgttctaatatcctattgcagttttagttgttttaattaataataatgcatgctgcaatatcaaacaacaatatttcagtgacttaataggtggagaggccaaaggaaaacttcccctttgccctctgggcagtccctaaaaatcaagtttcaaaaggtgaaaaggaaataaggaagtactttagaggagtaataaaagatttttaggggaattcagtcggcttggagagcacacagtgccctgggacaaagtctgctgggcccacagaacagacgatggtttgtgaaaaatatctctcctggtgtgtggaaagacttcagtctttcttcctgtgatatgagttttaatcttctctggttaataaatttcaaagaccattgtattcctcctcagcaggactggtcccttcataaatcttcattctgtgctttgggaaagacagataatttagttaggaggagagaaaggtcagagagaccttgactttgcttctttagttcagttctattttggagttaaatagtctggtttagtccataggcaaacatttaatacctgttcatactctctgtctttggtaggtcaagaggctgtcttagcttgtttgacctgctttgacaaaaataccatatactaagtagctgataaaaaactgaaatttacttctgagttgtagatactgggaagtctaagatcaaggaagattaggtttctggtgagggtttgccgtctggctcatagagggcgccttttctgtctcctcacatggtgaaaggattaaatgagctccctcaagtttcttttataaaggctcaaacatattcatgatggccctgcccatatgatctgcttacctgctgaagatcccacctcctaatactatcatctagcgggtgaggatttcatcatactagtttttggggaggatgtaaacatgcagaccatagcaaagacttttcaagtaacggctcaaataccagaacccatttcatcatctagcttcaccatatcaaaggaaaggaagggaagcagagagatgtcaggctattcaagagcatttcatatttaattatatgtaaaagttacttttatattttaacttgactgggtcatgtactgcccagacattttgccagacattgtcatagtgtttctgtaaacatgtttttggatgagaaaaacatttaaatctgtaggctgagtaaagcaagttactctctgcaatataggtaggcttcattcactcagttgaaggcctgagtagaataaaatggctgactcttcaaactgagacatcagctagtttcctgcttttaaacagaacagaaatggtggcttttcctgtgtgtaaagtctgctggtttttgagctggcttttgaaccatcagttctcctaagtctctaacttgttgaatcacccagaaaatcgtgggatgtgtcagcctccataatcttatgagcagtttccttctttataatcaatttctccctatgtatatagatattataagggactagcttacaataaatattaatatttaaatagtaaaatactatatatgtgtatatgtgtgtgtgagtatatatatatataccactgccatatatatattttatatataattatatattaatgatattaatatatatatatatatatatggcagtgagtgtgtgtatttgtgtgtgtgttttctattggttctgtttctctagagaactataatacagtatggatgtgttgaacaccacctttccccccattatattgaccagaaccagatttatggtcttgtctaaaagaaagggtggtaagtagtatagtttttcatacatccagaaagaaaatttaaatggctttataattaataataatatttctgcctcattctgtccctctactgatcagttatgcagctcatttcattctttgtcccttaaagcaccatcagttttttcaagggaatcaaacccgagtcccattccaacgttgaattcagtttgaaatacaggaatatgtctagttgatatgtaatctttttatcagacccagatatagctattcttggagaatgtgagcaagagtgagaggtgtctccctagctccaaatatacaattatagaactcaaataaaataacattaataaaattttttaaaattccaaatattacaaggcaggcattgcaacattcttgcctgagagaggaggtaaagttcctttattaattcattcatctgctcttggggataggagaatactttgtccaagattattgactctgcattctgggaggtttttcatttactctttatggtcatgtctaaaatagacattttggaatatgcacttgtcggattcagttaacatttacagctcccttcctgaatatgtaaggaagaaacagaagtttgttttatgtcttatttactcaaagcatttttagtacaagctggtgatttctcagcaatggaattctctcaatatttcagtagagttctttctgctttcaatcaatttcatgtgccaataaattcaaaattctttcctagttgttactctcaatgctagtttaacagactttctcaacccaattctctcaattcactggtgactgtttttaggctctccagaaaaagagaaggtaggatcattccctgaatcttgtctttctcttgagttgctgtatttagttgagaagtttcactggtcatttgtcactcaaagtatttattaaatcctatttcttattctttgggatcaaaaagaaggccgtgttttcactcatataagaacaaagaaataaatatcccaatctcactcttctcctaacttctgatctcttgctgctgctctccaatggccaaacacatcagggagcaaatgagacttttggtgcaggtcagtgtcccagggcacaaagcagagacgaatggagagtgcatttggagagacaaaaagcggatagcacagcacttacttcttacgatttttcttcatgtggatatggaaactcttttggttccagtttatattcttaagccctccatcgttaaaggaacacagaaatctttagtaacaattctaagacatattactacatatttaaaacctagacatatgcaattgaatttttctttaaatcattcataaattcactatcaatctcataattgtgaaatcacaagatatatctacttgaaattctgaaggtgataccaaatgttatgtccaaaagtgatatggtttgggaaaaaaaattagaaagagaatatactagtatttctgccaatcatggaaataatttaaaaatattgcggttgctcaacttgttctataacatagaagattccattaatgttaaaataaatcttactcaaacaatatattaaaaggacttaaacttttgctttttatgtttttaatttttataatggcttgttggcatttcaatattgtcaagaaaacaccacgaatacacaccattaatttcagtaatttttggatattttacataatgtattgccaatgtaaaaataacttgaatgaattcttatgactcctaaggggattcatatgaactcatttcaagattataataggggaaccaagaatgttttttcttagtttgaactatgacaaatgtatgaataaatcgttatttgatcctattgccttaggaaattcaaaagatgcttatgggtaaagaaaaataaaaaggaaaaagcatgacttaagacatatcaaaacaaatgtgtattcagacttttttaagttatagaattcttatataaaatatataaaaaatgtattatacagatctaacataacttctttttaaatgaaaaatgtctgtatatttttaatgctttgctgctgcatgtttgtactttgtttcaaataccatcaaactattaaaacagcaaataactgggtacaaaaggattgactcagaatgcctaatggaacagcagtaacaatcatgaaaaatgtttaacttttttcagcactggcttgatggtattattttgagctcatctagtatattgctgaggattgctaaaaaatgttagcaatttgtgaaaatgccatcatgttaatgtacacaactttctgttcacatttaataaaatagcatactttattttgcttttgtagattgccaaaataaaatatttcagaaagttttctgagtaaaagcttgggattatcattttttcccttgaaattttgttggtaattcatcttaaaaaggcagtaatagtaaagtttactaaagtttaaacttgaaagcaaaaaaatgatttgaaaagaatttgatgttcacttgaatgaacaattgcaatttatttttcatgaatagtttaaaatttgcctggatattcttctttcaagaaacatctttgttttgtaatattgtattattctttcttatgacagccttgtcaaaatgattagatgttattcttgaaggatagtcattcaacaattattatcatcaattgcattacagaaattttgccccatgcttttgttcctagggccttagtttaatagataccttgtactcagaacataattaggattcctgccttataaataatattttatttttgcctttcaataatattataatatgaaagaaaaataagaagcaaacaaattaatgtcattgattttcttgaggtaaaaataaagtaatgcctccagagcatgcttgagacaagtataaatttagccaaaaatatatccttttctcatgcagatatgtacaatacatggccaaacacaatgtccaaaattagtatcctaaaaagtaacattaaatgcacacgcactcatggtcctgtgttataaaagaggtttaattatgatcactatcatctagttacaaagacaaaaaattcagccaaactggctgaaaaagaagacgctttcttgtcaatacaactttcagatttatctgacctttggacatgtatcttggttttaaatgtacatatatgcgtatgcatctataactgaatataaccgtgtggatgccatctatatgtctatgactgaagaaaaagatagtgctattttcaaatatgctgtcaaatgacactgttttaggctttgtaaaattcatgggaggctagtcagctagtcatctttggaagcaaattgaagagtcaaaagcggttaaatttgcaatattttattcaaatattcacaattttgtaatgctgagatctattagaaaccacagaacactgaatatctacttccatatttcatacagcaaattaaatgatacagactacacttaatgaaattcttgctcaacataatgtaagatagagaaaaaaatacatgaactttctgaagttggagattgtcaaataaaatacaaatcaagactagaagagagaggaccagtgatatgctgcaaactgcttaccaaagtttcccaatttttatcactgataacaatgaattctcaataagtgttaaatggttactcaatcaagaaaagtgtattttgcaaatgatcacataatttagatattaataatggagtgaatgcatgaagtttctcatatttttatagcattgtgattttagccatatagtttatttataatacatgaaaaattttagtgttttggcacataaatgctcaaaagataattgaaaatttacttagtatgtgcacaagtttcagcacccctaaagcacatgaatagaagttaatcaacataatttttaaaaagcataaatcagagttttgagagtctgagttgggaggattgcttgaggccagctttggcaacatagtgagaccccatctatttaaaaaaaaaagaaagaaaagaaagaaagagagagagagagaagaggagaggagaggaaggaaaaaaggaaaaggaaaaggaaaggaagaaagaaaagacaagaaagaaagacaagaaaataaaaaaagaaaaaaaataagtagtcttagctacaagggaggctgaggccagaggattacttgagcccaggagcttgaggcttcagggagctatgactgcaccactgtactccagcctaggcaacagagtgagaccctatctctagaaaaaataaatgtgttaaatatcaggccaaaagtttaaactttacttaatatgtaatagaaaccaaaacaaaaccagtggatatggaataaatttagcagaagtaagaataaagtaattcaatgctataaaaacatgaaaaggaaaagatgaaaacaacataatatttgctctcatggagctaatagaaattggagaccaaagtaaaacaaacagttaaaattctatagaaaacattataatgggtttacctatatgtgctatttgaggcacaaaaagttagacattatctctatcctggagaaaccaaagaaacatttgtgacatatcatttgacccaagtccttaagaattactgcagaatttttaattctgtatatccttcaaattcaagttcatatttcttcattacagcattttagatgcaggaacacataggtaatttctcttgaatgtccctaaaaccatatttatgctttggagctaaacttctgttctagtttattctgagtgtgtatacatatattatctacattaataattcaatttgtgagaatttgattgcagtttgattatatttatatctccccaagtacctacctagtgcactaaatgactgtaacctacttaggacaggaaatcccaagagtcattttgattatgtaatgcttaaattcaatagttgcaatatatgaagactctatttagtaccttgaatctcagtagcaactaccagttaccagaaagtttctataacctaaagttataagtattattagtgtgtgtgcctgtgtctgtgtgtgtgtgaagagagaacaaatgactgaaagcactataatattttaatagatacagattatttagttcttattaatacatagaaggcattttttttttggaggcggagtctcgctctatcgcccaggctggagtgcagtggctcgatctccgctcactgcaagctccgcctcccgggttcacgccattctcctgcctcagcctcccgagtagctgggactgcgggcgcccaccaccacgcccagctaattttgtgtatttttagtagagatggggtttcaccgtgttggccaggatagtctccatctcctgacctcgtgatccacccgcctcggcctcccaaagtgctgagattacaggcgtgagccactgggcccggcccataaaaggcattttttaaagttgtttgagctcaagatctggcagcataatacttgagtaaaaatgttaaaataattgttatgccctaaatacacatttaaattaatagatatttaaatacatttaaagttgaacttgaaccttagagttttgtaaaacaactggtagtgtagtcattttttgttttaaagctccctatcaaaatcacatttctcttgcttcctatagtttgttatagagatatatctttaatacaaattactccttatcatataattggaatttcggaagggaggagtatctacattctgtattagaatgtaatgatgtacaaggtataaaatgtacaaggtataaactagcaaagaaaaaaattggtcagaatatggggattgtcacctgagatgaataggtgaatttgccaagtataagacagctataattacaaaattaatagttttggatactcttaaggatctagagagatgaagaaacaaagggatgggcaagttttctgaaattgccatgaagaaactggcatgttttggaatgacaacagccaacatgaaaatcttcgaatataaaaatataaaaattggaaataagtatcagtcaaaaaatgatgaaaaatctcttggatttaaatttgcattttgtatatataaagaagaaaacacattattgcggctaaaaaatgtacagggagaagttgaaagttaatttgactcagcctaacaggcactttaatagacagtagtacgtttccattcttgcatgtttatttttgttgtttcgtataaacctagctttgtaaagtgtaacacatccctgtaattagtatgcacactgtaccttgaaacagaacaaactatggttattatctgtaccttgtcaagacaaggtgtgacatttgataaataaagcatacttctgggagtttataaggaaaactgtcttgaacaatactgtggcttttctctgtattttctacttatcatctctgcgatagtattaaatccaaaagaagagcaattatttctcttgggagtagaatgagacaaaaatgttatgtggctgaagtaaaataactctcccatccctctttatttttctttccactgagcttgttttcttttcttaattttccattttcatttgctgcatggggtctattcaccacctttcctaccatctgttacctatcttctttccactagagaaaatttaatagagtttaaggccaataacttcatatgcatttcccttacaatttttttttctaatatccacattgatctaaaaaaatcaccataaggtgtagagctgtctcacataaggcatttattttagagaaagaaaaaacatttctgtagcttctatttgtaaactgaattccagtttaactcagtacttctgatttcactaaagcatgtaccacattaaattctttataaatttctgctacagaatcgtaagaaaatcatttagctgcttaggattttttttttttttttagaaaaaagaaggttaaatgctaatttgttaaaacattcccaaatttgtcacttacacacagccttagcactaattactgccctgggatgatgggatgcaacttccagctagaaaagagcagtgaagtagcatctcaggacaccagctgtctggccaagaagctgtaaacatgtatccagaggctatttagttctggactaaattcttctaattcgtctaatgctaatgatcagttctgatagaattctactatcaccttcttgtactatatctgttggagtttttttgcttgtttgtttttttacatttgctatttgtctgtctgtctacccaaccattgatgtactcagtttttactttttaacagttgtgtcagttgggagaatgatgattttaaaatgttttaattatcaagcaaaagaaatatttaatatgtctttaaattcattaaatgtattttggtagggcataaattaaatgtgtttaaaatttctaatgtctacaggcatgggggttttctttatattgtatctagagagaataagaatacattctaataataaatttggggtaaatactgctttattttttaactcacagactggttaaaaaatgcataaagtcagaaaaaaaattgtgtgtgtgtgtgtgtgtactctaacaccttgagatcattatttgatttgttattaaatttctaagtaaatgatattagatattagaaactataattgtatttctatgtttttacatttgcgtatgttctgaaatcaatttatgtgaatttggagaagtatattcagaattcaaccccttctcactaccttcatggctgcaaacacgatttgagtcactatcatcttgcattagattagagataatcatataaatggtctccccagttctttcttgtcaccatgtattctcgaactagtgatttctttaaaggactcttttgtcctaatcccttcaacgccttccatttcactgagataaaaatcctgatttcaatattctaccaggttctatgtgattaggaactctattatctctctaaccccctcccattcatctccctcttcctcactcctccagccatgctagtcggtttggtgttcctttaaaatccaagtatgttcgtttcttaaggtttttgtccagaatgctcttttaccatgtaaaaacctgggtgacttgtgcaccatttttcagtttttgcttaaatttgcttttcactgagatttgccctaacattgtttaaaattaaatggtttttggcatacttgcaactcttgtctcgttttctcctctgtgaatgtaattcatttggttgtttagtatctgatcattttctgtctctctaccatacaatggaaactccaagaaggcagggacttttcttttgttcaccagtgcatcccaacccctgaggacactacctggcacctggtggggggatcaagacacgtttggtaagtgaatgtacctatgtgttacattgagatcagcactatagagatggttgtacttggttatactgtggctgtactttgtttatttcccactcttctctctcatttttagatcaagggctgtttttccttcacctgaattcaccatgaatcagaaacaaagatgtaaagatatacatgaaactaaatttactttgaggggggaaatccggtgaaactaatattgggtaagaatagagtaagattggagagacaattcataacaaatgggaagagaaatgtaatatacggatttgaaggtcaagggtgagaagccaccaacagcaaggaccagggaactggtacaaaaagtctattggacaagctattctcaggtgttgattgagctgcaccaagtcagtatttgtagcaatatactggtatcctgaaaggaaatgcagttcttgaataacagtattttaaaataaatggtaaaaacaagaaattctgtcaatagcaaattattaaataggttatactccatccacattatgtggcataattcagcggtacaatgtttaggtgtagctactgtataatatgaatatatatgtaagtatgcatatacacatatatatgtaaatgtgtacacatgcatataggtatgcatatatatatgtgtgtgtgtgtgtatatatatatatatgcatatgtaagcctagagaaaaaaaagattggtgtccccaagccattacatattttattttgtgtatttatagaagggtgagggtggggttgagtaggacttgcagaaaacttaacttttcttccataaaatattggatttataaataataccaataaatacctttttgtaaatacaaaaggttcttttagaaaaaaaaaacttgcctccctaagtttataaagcaatctcacttatcaaactcgcatataattagcctttccaaaagaagtgataacaagtgaaagttgccataaaacaatagcacttatctaataagctaataagctcaatatgacatttcattttactgactctttaaaactagtctttttacttgcatttcacattacattcactatggttatgatattctagtgtttttatattctaaggcatgtcattgaataatgagtttacacatgacctctttatgtttcctcatagatgttaaatatgttaaggagtgtatgtgtgtattgttttttgtttgtttgaaaaattgcccctttttctttggtgactgttaatagagttgttgatgctgttattcacttctatggtgtaactcaaacaatccaattttttgaaaaaacatgtacataaagtataatctgtgtacattcttacaaagccttcatttgagttaacaaaaatgtctactgaatttaaaactatactaataactgaatatcatatgtttttctttgaaaaagatttactccaatactaccatttaatcaagaattccttcagaaaatttgaagactgacgcaaagcattcagaaaagataacctacttcattttcgctctctaggctcgataggaagaggctgaagtgcattacagtatcgacattgttctatttttagttaatctgaatccaaaagtggctctgagactagatattaaatgtaatgaagcaatagcttatttggaaaatcagttgcatattcaaatcagaataatttaacaaacttatgaaattgattttatctagaagtcttagcagcatttttgaatttgctcatggccacatattaactgattataaatgaatgttttaacactgatgtgtatgacagccataattccataaggttttatatgtaaaaatgtagcaaactgactataaagtttcttcaatgaatattcttcacttgtgcctgtgtgcattagctctacaatggatgattatatttttattgtatttttatagacttgaaaaatgtttttaagagcatcttttgaaatgtgagccttaagtgtatgtgtgtgtataaatatataaaatatatgtaatatataatatatataatacataaatatatatgtatatatataacatacaaaatagtgtctggaacacagtaaacattatgttaatgttttatagttattaactcatttaatcattcttttaagcaatatattacaaaatgcttggcttgaatgagtctacctaatttttgctagcctttccattacaggttaaagatttatctttctacataacagttactttatgcagcttcaacagcacatcaatttctattttcattgaaagcactgtattatttcctagccatgaggaaacatttgggggaccttatttaaattctacccaagagtcttctctaagaaaactctgctccccaaagagaaattgtccttttaataatatattcttagattagaagctcaacatgctgtaattttctcgtgaaacatcctgagttggctgttcataggtgcctacttgtggtgattggcgtccattaatcctggtgaggatatgaaaaccacacagctactagtttgacaaccactgcagcagtgcctcatgaacatagtgttttcatcgttcttccaaacactgtcaattaggcctttgaggtatagatttgcagtataagtaaaggacagtttggtagccatgtagcaaggatgagctaaaaagaccataccaatttgagctcagtaagttccagtacatacacaaaactgagcccacatcaaaacagaatttttacaccaggagcaactttgaatcttcattgggcttgcatgaaaatgtcagtgtggcttatggtgaagaatgggctcaaattatataaagctgagtagggtaaagactgaatgaaagatagattatattctacttgagtagagtcagtaatggataacaaggcataaggacataatttcacatttgaatggtgttttattttgaagatatgtaagaatgcacacatatactactatacacatacatacatatgcattcaccaggactatgtctatatttcttattgcattatcatatgttgtgtctatttgtcctgtttgtgcagtagtttcctataaaagtgagtgaaatagatgtaacaataatgaaaatgcagaatatcataattgaaatttagattattttaatctttctaattatctgaatttattttcacattaaatacccattataccaagaataattccttcagttcatcagatgtgatactaccattgtgatcttgtaaaaataaactttacatgggttgggcatattctccatctatattaaattgttttaaaaacaatatttaaagcacatcttatctcaatgattgttttgttaatttcatgtttgaagaaagagagaaaaatgaatagcatatttacctcaatactaccagttcatcaataatctgttcagaaaatttaaagactgaaacatagcaatcagaaaggatagttaccttattattactttattggctctatagaaagaggttggaattctttatgtcatcaaaattgttttttttttttctttagttaatctgagtcaaaaagtgcctctgcaggctggaccttaaatataatgaagctagaaatcgtgcatgctatagtaaaacctggcgtatctcctagaatcacatgctctctttcctctgagaactgttagaatgaatccttcagttatggaaaatataaaccaatactaattcactaatttgggtcatgcacttttacactgagatgtcagtgttagaaatgtcatttaggtctctcagtatcattaagccctggcacggtgagaagaatgttttaccacaagtctgaaccacagtttcccccttgctagaaatgtatgcacatgtttttttccaaaagataacgtgaaaatcaagaataaaaattgttgtgacgaagatgaagtcagtgtatcttcggtttgtgatgttagcaactcagagcctggatagtctatcaaattccatatgtgatgccactccagatagtttttctcagaggttggaaaatataaatactgaaatattgaaattgctttgctttgttatggagactattacagaatgttagttgatccccgtctctgccctccacaaatctattctctccatttttcatagttttggaaggttatcgaggcacgtggttttgtgaagattacatttcacacctagccttacaagtaactttaaccatgtgactaatctcttggcagtagaatgtgagtgcaagcaatggtacaaatgccagacgacttgttagctagccatttcatttcttttctatttccaccagctggaatttagggatgaagttttaacagctttggctatgaatagtataacatcttaggatgatgaagcaagaaggtggaagaaaaaatggagtaaaactacttacccatcccagcaccctcatttatttccagactgtcatgtgagagataaggagacatatatttgagaatccatttcagcaccctatgcttatatcttaaccaatacaggaatcagaccacacataagttgagggttttcactacacttcatagtgattctcactgccatttacttgaagacagaaattaggcagtagttagatttgagatagaagggctttatctttttatttttcttagtatttggttgaaatatcatggaatccatttgtaaaaaggtatggcaattctcatagacgaatgttgagatgacttcacaacaattagacgtgttaaaaactaggcaacaactaacaattttgagaccagtatttgaaaattaactttaaagaaattatacaggaaacattcacattataataatttgacattcacaaaaattctaggttagagatacattttgagaaggactaaatatcaaaactaactttcaagtccaattactaatatttagatgtttaaaaaagaatacaactgaacataattagctctaaacattgggatattaaagataattattttaaaaattcaaaatgtgaattgcttttatcccaatagaatagaaaattatgttttcaataaaatttttaaacatgaaataggttggtgctaatctatgatgctccttttaatgagtatttattttccatatgcaaaatatgtttatgttcctctcaatgttctcaatttttttattttattacgatatcagttcgaagttcaaaatctcatcagctctaaacatttagaggtcgttttccaatcttttaaatcaagtaccattgaaaatcttgaatatactctgttaagtaaagattcccaaaatgtaattcttctccatatgtgaattcaggacactaaaggaataatttatcttaccttaacattctcaatataacgtggtgatatgtgcatagcataagccttacagacattccagttcaaaaaatggagtatgtagaaggcaaaaataattctctgattcaaagaatctgtcaacttaacaaaacatatcagagaaaaatgtattttaaaataatgattttattagagaataagcagaaagtattgtattctgggatgcacagatatagcaagccacaaatgcatctgaagcagggagggtaaagggaaggtttctttcttttcttttcttttctctttctttcttttcttttcttttttctttcttttcttttcttttcttttctttctttctttctttctttctttctttctttctttctttctttctttctttctttctttctttctttcttctttctttcttccttactttttctggcaaaaaaggagtttatttaagctgcttggaaacagagtttattggtttttgaagcccaaagtcaaagatgccatcagtacattgtaattcattggtggagatgctgttactgggaaaatgttctttctggagttgctacgtgcctatacaatgcctagtgataaatcttgtcgtagaaacgtgtacatatgcaaaatatgcaagctgtttaaagcatgagatgcatgaagggtgtgagagaattgattgcggggttatttttaaaagtctttgaaacagttttgatcctcatacatgcaagcatgaactcctctcctttgtactctcctggccccaatatttcttgctctgactacactgacttcatcatagtatcttagactttcatagttttaatatcaactgggcaaattcaagctagagttcttcaactgggtttcaggcttgggatgaatcctttgtggttctcagttacgttctctgaactcttggttctgactactaggcttttagttctaacccctgatttctagcttctaccctctgagtcatccgtcatatttcatggaaattaccacctgcttcgaactaactagtttatcagcctacgctggccagtataattttgggggtccaacaggattcttccattctgtgctctctctgtccttttcagtcccaaacggaaggatttctgatgggaaaaattcaagaaaatcatgggccatgcatgaattgcactgggtttcaccctcttagacaaaatccatttccagacatattcctgctgtaatattttttctattgttggctttagtcaagatggctgtgggaagctcttaagcttcctctgatttgattaagaagaactttgaagcacacccttcctctattgtgcataaacatactgacatgttgatctgtccaaaaattcaggaaaaaacttgtacagaaatatgctcccttttttctataccacactttaagctgggatatcatacttttagtattgttactatctgaacaggctaaaatttccaaaatctctacctggttgccttttgtctaataactattaccttaatatatttctctttccttgcattttactgtaagcaagaagaagccaggcattatattcaacactttattgaaagacttcttacttatattgaggtttggcacttaaaagttctgctttcttgatatttgtaggatgcaattttgccaagctttcttaaccacatttctcaaactccttcctgtagtttggaataggatgtcctcatgacttctgagccctccctagcagtattccttttttttttgttttgttttgagatagagtctggctctgtcgcttggctggagtgcagtggagcgatcttggctcactgcagtctctgcctcccgggttccagcaattcccctgcctccgcctctcaagtagctgggacctcaggtgcgcgtcaccatgcctggctaatttttttgcattttttagtagagacggggtttcactatgttggccaggatggtctcgatctcctgacctcgtgatacgcccactttggcctcccaaagtgctgggattacaggaatggtccacggcgcccggacagcagtattcttaaagtcctaatttctgataatggtcttcacgtgacaatttgtgctttctctaaggcagtttaggatttctctctcgtgttcctttctttttttgagccctcctcaacatcttcagtaatccatacttttactaaaaatctgtttaaggtaattcaggctatttctaccatactcttcagaattcttccagccttcgtgcactacccaattccaaagccactctagcattttatgtatttctttcagtagcactctgttttaagtaccaaaactttttattagtttcctatttctgcataataaatgatcatgaaatcaattcagaaccttgaataattatttttctacctagtcatcaagtcacacaccatatacttacattatatccagctaccttataactggcaattataaaattttaacatcaaatttacttcacattcctgaatactatgcaaaagcatagttactatgaatttttcagagtaggttggggatgtattttccaatttaatgaaataagaaaacattctaaggtggtaacacagctgcagctagataaaggaaatatatccccgagttttcatgtaaatcagctatgttgtaataatctgagggaaaaaaattaatgattaaatggtaaaggaaaacatagttactgtaataatcaaatgccaaacttatttcaaagcaaagcttcaaaaatgtatttgtcatttattattaaagcctgagatatgagatctcaaaaacacatttttataaatgtaactcctaaaataatttcaaacacttcctgctgacagttatcaactaatgatgcacattaaaactagtgaaacaactgtattaaacatttgttaacaaactgccatagaatttaattctagtaagctttaatttctcttttataggtagaaatttcacaaattgatggaaaaattaatgtgtttttattgagaaatatgttagcttcaacaaatatttattaatggaagatatttactaaatattttcatgttgactgtttcattcaaatatcacaatgatcctaaaggttggttatcattaatcacaattttatagatgacaaagcaaacccagagttccttagtgataattatatatccagataactgctaaagtagatttttatccaagtattattaaactaagtacaatgttttcctcttattctatgagaataatgaataaacatttttaccttaacaataaaattagcatctctttacgatgattaagtgtgtgtgtttgtgtgtgtgtgtgcacagatcataaattagatatgttttgccttatttccttgtattagttagaattattatcaactagaaaagtatagcttgtaaataactattttcattttaatatacctacagatactaagaatttattttcatgatttttatctatcattttcctttgatttttggtataattcatgaagataatttttttaatacaaaagtttttcttttctaaatagttctatataatattggcagccttaattgtgttctgatggtctttctctaagttggaaattattttttgatcttaacatttaatattaatatttttttccgaatttttgttatacataacattttatcaaaagtgttagaggttttaaacatttttttcaagttttcttgcaatttcacgaaagtaatgtgctgtaacctgctagctgagcttaaaatcttctgctttctctgagttgacagattgactacatttccaagcttctgttgttaagtgtggcaatatgactaaaccaatggagtaagaggggaagggatgcatgcctgtgaaaattctgacccattaaaattactcttttcaacttccccaagttcttttccccttagttggctagaatgaataaaactcccaagacaaacttggaaactatgtgtgggatatacaaaggtctctggcagtctagttccttgaatggacatgggagaatgcaggagagatgttctgaaaacataggcatacaccatccactgttacacaattaaaaacaaaaacaaggccaggcgcggtggctcacgcctgtaatcccagcactttgggaggccgaggcgggtggatcagaaggtcaggagatcgagaccttcctggctaacacggtgaaacctcgtctctactaaacaatacaaaacaaaattagccgggcgtggtggcgggcgcctgtagtctcagctactcgggaggctgaggcaggagaatggcgtgaacccgggaggcggagcttgcagtgagccgggattgcgccactgcactccagcctggccgacagagcgagactccatctcaaaaaaaaaaaaaaaacaaaaaaacaaaaaaacaaaacaaaaagaaaacattcttttggtgtactgagctattatgtattttgtttctgtttttttatagctgttagcaccctttctctccccaccccaaaaaacaaaaacaagttgtctgttctgaatataagttcagttcccttctgtgaaattgctgactatggtcacatttgttagcccttacagagtgaaaacttttgttcaatattttaggctgatttaagctctataacttactttttagtcttctttcagttatttcctaagcatatctttttcattcatagctcattaggatatcagaaccagtgtgacagtacccttccttccaattgctagccttcttagaagcctgcttcgttattactaccctcattcattcatcctgacactggtaaagtgtcgattgctccatgtgatttcctcagaagctggatcctctgtcagagggcacttcctttcttctctctttctttttatgcttcattgcctggagctctggcagattttttttaaattttattcagttccccaatggggtagaccaaagtttaggaatccccagttctccccagtgaagtctagtagtccccaaaactcattctggttttattaccatcattgtatatcacatttgtgggaatattgatatatagatgaattccttgtttctagcaatatcacagactgatagtattgtatttattatattagtttggtcatttatgtagaaaattagagaaaaggggagtcagttttatggacttagaatatcatgttaaatttggaagccaaaattctatgctaaataattaggtatttctggaattacatatggatatataagtatgttaatctattaaatattaccaacaaaaaacattataacatttaataactgcataaatttaaatatcacttactttcaaattcatatttgcattttaagccagggcaaagtagcattgaaatagacttgtaggcaagaaagagtagtaaaactattgtaggagtgctggtaagaaaatgtttaattattctaaataatgtttaaagacacaagatgtgaaagttaaataaatgtaagaaaaatttttatgtaaagagaaacaattttctagaagtcagttttagcatcaaagttagaaaatattctcaattctaacctagagataaattctaaacaatggattttaagggactctcaaattaaaagaatttttaaaaacaacattataagattaatcttgacaaatatcaataatcagaaaaactcctactctagaaaaagaagaaaacagattgctcgacgaaggaaaagtaaataaaattacagtcagtcgcaacaacatagtcagggtttatatttgtgtggtagtcctgtatgaatccttgaaatgtctagtactttagagaatacggtttggagaaatctgttctcacaaacattgccatttgtgggaaaaatctttccatgagaattactgtgattctaattatatatagttaattctaactatattatatatatatatagttgtgtattcacacatacacacttgtacatgctgtttttctattaaaaataaaaatataaattaacagatatttatgcagaatgatttatgacatttgaaaataagcacttgtgacaaaggtttaataaatagataaaactgtacataaactgcagaagcataaataatggtgttagctgattaaattctaatattttaatatgttatctctataaatgattcaatagaaatatatttaaaggattttatttttaatttatttaaaatttttatttccaatttttatttaagttcaggggtacatggtcaggatgagaaggtttgttacataggtgtattagtttgttctcacactgatatgaagaaatacccaagactgggtaatttatttatgaaagaggtttaattgactcagagtttcccatatctggggaggtctcaggaaacttacaatcatggcagaaggtgaaggggaagtaagcaccttcttcacaaggtgtcaggacagagacgaacaaaggaggaacttccaaacgcttataaaaccatcagatctcatgagaactcactcactatcaggagaacagcatgggggaaactgcccccgtgatccaatcacctccctcccttgacatgtggggattacaggtccctccctggacacatgaattacaattcaagatgagatttcggtggggacacagagccaaactatatcaataggtaaacgtttgccatgttgatctactgcacagatcatcccatcacccaggtattaagcccagcatccattagctattcttcctgatcctctccctccttctactccccactccgatagcccccagtatgtgttgttcaccaccgtgtgtttatatgttctcatcatttggctcccacttataagtaagaacatgtagtatttggttttctgttcctgcattagtttgctaaggatagctctagctctatccatgtctatccatatcttccagctttatccatgtccctgcaaagggcatgatctcgttccttattaggaccacagagtattgcatggtgtacatgtaccacattttctttatccagtctattactgatgggcatttaggttgattctatgtctttgctattgtgaatagtcctgcaataaacatacatgtccatgtgtctttataatagaatgacttatattcctttgggtatatatacccagaaatgggatagctgggttgaatggtatttctgcctctatgtctttgagtaattgccacaatgtattccacaatggttgaacatatttacactcccaacagcagtataaaagcattcctttttctccacaacctcaccagcatctgtttgtttttttgactttttagtaatagccattctgactgttgtgagatagtatctcattgtggttttgatttgcatttctctaatgatcagtgatgtcgagttttttttcatatgttttttgtctgcatgtatgtcttcttttgagaagtgtctgtgcatgtccattgcctactcaaaaaaatttttttcttgtaaatttaagttccttattgatgctggatatcagacttttgtcagatggatagattgcataagttttctctcattctgtaggttgtctgtttactctgttgatagtttattttgcaatgcagagatctttagtttaactagatcccatttgtcaaattttgcttttattgcaattgctttcggcatcttcatcaggaaatctttgcctgtgcctgtgacctgaatggtattggctaggttttcttctagggtttctatagttttgggttttacatttaaatctttaattcatcttgagttgatttttgtctgtggtataaggaaggggcccaatttcaattttctgcatgtggctagccagttctcccagcactatctattaaatagggaattctttcccaatttctggtttttgtcaggtttgtcgaagatcacatagttgtaggtgtgtggtcttatttctgggttctctattcttttccactggtcaatgtgtctgttcttgtaccagtaccatgctgttttggtcactgtggccttgtggtatagtttgaagtcaggtagtttgatgcctccagctttattccttttgcttagcacgtccttggctattcagggtctgtttcagttccatatgaattttaaaatagtttgtttctcattctgtgaagaaggtcaatggtggtttaatgggaatagcattgaatctataaattcctttgggcagtctgaccattttcatgatactgattcttcctatccatgagcatttttcctgtttgtttgtgtcatctctgatttttttgagcagtagtttgtagttcttgaagaggtccttcatttcccttgttaacttaattcataggtattttattcattttgtggcaattgtgaatgaaagcctgttcctgattttgctctaagcttgccttttcctggtttataggaatgctagcaatttttgcacattgattttgtatcctgagcccttgctgaatttgcttattagcttaagaaacttttgggctgagctgatggagatttctagatataggatcatgtcatctgcatacaaagacagattgatttccttttttttactttattttttttttacaatttataaatgattttatttatttatttatttattttattattattatactttaagttttagggtacatgtgcacaatgtgcaggttagttacatatgtgtacatgtgccatgctggtgtgctgcacccattaactcatcatttagcattaggtatatctcctaatgctatccctcccccctcccccgaccccagaacagtccccagagtgtgattgatttccttttaattcactatttcttcctcttgcctgattgccctggccagaacttccaatactatgttaaataggagtagtgagagaggacatctttgtcttttgctggttttcaaggggaatgtttccagcttttgcctattcagtatgataggcaaaagctgtggatttgtcatatatgactcttattattttgagatatgttccttcaacacctagtttgttaagagtttttagcatgaaggatgtttaattttatcaaagacattttctgtatctattgagataatcgtgtggtttttgtctttagttctgttgatgttacgaatcgcatttattgatttgcatatgttgaattagcctcgtatcccagggatgaagcctacttgatcgtggtgaataagctttttggtgtgctgctagattcggtttgccagtattttgtggaggatttttgcgtcaatgtttatcaaggatattggcctgaagatttctttttttgttatatctctgctacgttttggtgtcaggatgatgccggcctcatagaacgagttaggaaggagtcagtgctttttaattttttggaatagtctgagtaaaaatggtaccagctcttctttgtacctctgagagaattcagctgtgactccatctggtcctgggttttttgtttgtttgtttgtttgtttttcgttggtaggctatttattactgcctcaatttcagaacttgttattggtctatcagggattcaattcagtcttgggtgggtgtacatgtccaggaatttatccatttcttctagattttctactttatgggctgccataacaaagtattgccaaccaggtggccttgaaaacagaaatgtattgtcttataattctgggagctagaagcctgagatcaaggtgttggcagggttattttcttctgggaattgtgaaggagaatctgttttatgtctaactcctgacatctggaggttcactagaaatccttggcattccttggcttatagaagcatcactccaatgtctgccttgatgtacccaaagtgttttccctgtacacatgtttgtgtccgaatttacccttttataaagaggctagtcatactgaattagggtcataccctactcctgtatgacctaattttaactaattacatttgcaacaatcatacagccaaattaggttacattctgtggtattgagggttagtacttcaacatccaaatttttgaaggacacaattcaacaggttgcagtcataaagaatattttccaaaaatactttgcaaacaagtccctgaatacagtgaatagaacatgaaatggagcttaaaacatgtcttttgacataaaataaaaggcctagggatccttaattcttcaaagccaaaataacgaagttgagacattaaagggcaaatgtgagttactgtttttcatttagttgtctgtttttttttaatttgatactgtatttaaaatatattgttccattgtatcatcttaaggctggtgtaatgataagtttgtaatccttaacagtatcaatgacaatgataaacattgaaaaggcaacagaggaaagcatggtgttttgtgccagaacatagaggagttttgaagatattgagttgaatttaaaatgtctaccaggaaagtagtttcaacctcaaggaaaaggaagaaactatcaatggaatgaaaattacactttatcagagatatctacttcttaacgaaggttccatttttatagagaaatagcataaattacccaaaaagttatcaaaattggctgctagaatagaatttaagtgcagagtaaacagggaatttgagaagatgtagtgtcttaaaattctgtaaattttaataagtatgaagcaacagattattatcacactgaattgaattttcagttaaattcagtaatttgcagtcatatgccttttctgttttcctgtattcattacttgtaagtcaacaaaagccatttctgaaaacaaaattagactttaaaaagttttctttatattttagattcatattctaatatatacaaatattttatataactgttttattgttcattttgttatttggtatttgcaatttctagataaataattggctctatattctgttcatatccaacatattccaacagaggacacttaatatttccataaaaataaaaatgctggtgaaaatgtgtccatttttacagtctatttactcagcattattgctcattcatatttatttgttattttcctgcattttctgcaatagttatcatatctcaaactgacagcttccaaaattactattgagtccaattcttttttgtggatataggtagaattgattaccaccctctttgatactcaggggacttttttctgaattgctgcacataagcaaaatatttaatgcttatgcatatagggctaagtatagaatagacacttaagaaaagcttttaaataaatgaatgtgctatggatagattaagagctaagagagcatatgacaaaatgaatgcagtaatcagtgaatgacaagaaaaactgctaaccccgaattataaaaagatttttcatttatggatttgccaatttttatcaactggatatcattaccatcgatactaatgaggtgagtgttaataagtatatattatttaatttctgagaatagtactcctgaagaagattatataaaagaataacactagaaggggaacatcatccccaaatatgaagattcagaaatcattgtgcactatccttaaatttaaaaaaaatatatatatgtgtgtgtgtgtgtgtgtgtgtaatttgtaggtgtgagtttattgtgtttgaaagataaagcagctttatatttaattaaattggttttttgaatcacacttaagcaaatacttaacacttgcacaaaatcatgtctgactttctaaattctttctaatactttttgttttgtaaatttttctacacatgaattatattacaaattatgttgtaattcaaatttgttatactttggtggtcattttttctaaacaacttcagaattgtatttttagagatttacatatttcaatgttgtcatgcacatttcaaagaaaattatatggaccagttttgtttcatgtaactgtactattttaatatgatggatgacttcttctttagtacttgagtaaatgtctcttattacctgaaatttctctgctttattcattcattttttccaactttatggtgataacttgtttaaaaagcacactttgtttctaacttggtaaatacaatgttttcttcattgtcttatgaaaaatagtgtttatgtacaatcaaatattatactttttcactgaaaaattatggctgcttcatatttatgctgtaatgatatttacagcattatccaaggttatggttttatagtgtgtggattttgagtgcctccgtaatatctcaaaaacgtctctttgcagcgtttatttatttcccttaaatgaaataaacttgatctttgagacgtaggtctatgatttttaaatatgccccaaatgttattatgtgacattttataatgtttacctttttttcctctgggaaataaaattcaattgaaaataattagtgaacaaataaataaataaaaacagacaaacaccaaaaaacactagaattctgaattttattatctaatgttaggataattaaggacatatgtgaccatgttagaaataaagttgaaaatatgcttttaataatttgaaatgcattaaggattttgtacagtatatactattttcttaaaacatgaagatgttgctgatttattttaattttttcactatcaaaactgtataaattatattttgaatagtcaagataatggtattatataacatcatttagaatttttcaaataattacatttttataaactatgttaaatattaattttcatagacgaagttagctttttacttgcacacaatgtggaattttggtgaagcagaaaatcacctcattatgaaaaatatattgatggtttcaatatcaatgagaaggaatatcaacgaaaaatcgtgtatatcaatggaaaaaatcaaacatttagttcatgtttcacaacaattttaacaatgtagtgattctaattgccctatttcaagtttaaataaatttgtaatatataatttgcatttaaatgtttcccctaaattttgatttataaacaacatttcaatggctttgttgagtcaaccatagaactcaaaaattcttattcagatctttccctgttcccacttatgttgcctatgctagaattgtcagtgttgtgggacagagacaactaggtgagtcccagtaaaagttttcacttcctctattgtaagaaccctttacctgtgaacataaccaccaaagtctaaaaatacagtatttaggctgtcttgcatacagtctggcctgtgactaagttctggcatagaagtgttacaaggaatcttctaaggatcctttgtcaaagacaattcgaacactttattcttctctcttatatcgcctggaataaggatggggtacctggagctctggatcatgtatttcataagggataaattgtttagcacaagggagtatcaatctctaaaaacttcatgggctaagaagttttatcatcattagaccacctggctcttgactattatgagggaaaaataactaacttattgaagtcactgatatatgggttatgtgcaactcagaaggaacttaacatttgctgctacaaatttgtgctaacagcttctgtttatggtttgctataatacatcttacaaatataaggttaaacttcgtttctattttatacaaataaacacagcgattaaaaagataatgcttcttacatgaaacaattgtggtagatactagctagtgcatcttggatatttgtggataacagttctgctctaccactagccccagggtacctcaccatccctgcctatacccttataaatgtgttgctttattaaggcatttgaaatgactccctctgagtgtgttacctgtgcaaattgaacactgaaaatggcataattaatactaagttttccactaattggcataggatgaaatgtgggtgtagaggcaagcaggtgacagattaagtcgtttggcaagtataaatactacacataatttagcttcatttaactgctctagagggaaactagtcaggccaaatgtgttgatatggataaactaactcagaattaggaaatactttaagtacctgggaactgtcagctagcttagttaattaaattctcaactcagatgggactttagtcagtgagatacaaatttcggaatatccctggaatatagaaggggaagaaacccagtgactcagggagaatagcaatttttcagcggcctttgatgagtagcctatgggtatctaggtgtcctattccccaggcaccctaagtattactttgtgtctccatggttattcagttcaacacaagcaacttgtttccaggtggctggaattacctctgaaaagtggtattttatatgggctgtatgttggtaggttaggcacttagcaatgagggtaaacagattatccatggtgagcaagggtctatttttagtgtccatggagagcctcaatatttatcacatggtcactttgtatatggaccaacaattcatgcttggttgttagaattattcacctcggccagttagaaaactgacctctttttctgcctattggttcagtggcataaatctcaaaactgttggcaggtgggtaagaaaagtcagcctcaacttccaaaccactgaagatgtgaatacttttctagggagaaatatttatccattgagtaccaaaacttccagatgtcctaatctgattcaagatttggaagaaacagtatcttacatatatcttacaatatcttctatatctttagttgtaattgggagagagctcctgcccctgtcttccacccaattctcagaccaagatattctcactaaggagtagttgtcaccacatccgatttcttaaaatctctggcatatcatcccatcattctacttgagcctgctcttcctaatcatgtgttcaaaccaataaatcctgtgcatgtaatcatattgttatatttcctttaccgtaagttaaggaaagtggtcctatgagattacaagttgatacataggcattctgtaagaccatgagaggtaataaggtataaggaaggggtccagtttccattttctgcatatggctggtcaattctgccagcatcatttattaaatatggaatcatttccttattgcttgtttttgtcaggcttgtcaaaaatcagatggttgatgtgtggttttatttctgagttctctattctgttccattgatctgtgtacaagtaccatgttgttttggttactgtagccttgtagcatagtttgaagtcaggtagcgtgatgcctccagctttgttctttttgcttaggattgtcttggctatatgggcccttttttggttccatatgaaatttaaagtagtttttttctaattctatgaagaaaatcaatggtagttggggatatagcactgaatctataaattactttagcagtatggccattttcatgatattgattcttcctatccatgagcatggaacgtttttctgtctgtttgtgttgtctctgatttccttgagcagtggtttgtagttctccttgaagaggtccttgacctcaattgttagccgtattcctaggtattttattctcttgtggcaaaaattaactcaaggtggattagacacttaaatgtaaaacccaaaactataaaaaccctaaaagaaaacctaagccatactattcaggacctaggcatgggcaaagattttatgatgagatcatcaaaagcaattgctacaaaagcaacaattgacaaatgggatctaattgcattaaagagcttctgcacagcaaaataaactatcatcagagtgaacaggcaacctacagaatgggagaacatttctgcaatctgtctttctgacaaaggtctaatatcctgtatctacaaggaacttaagcaaatttacaaggataaaaatgaacaatcccattaaaaagtgggcaaaggataggaatacacacctctcaagagaaggcatacatgcagacaacaaacatatgaaaaaaagctcaacatcactgatgatcagagaaatgcaaatcaaaaccacacagtgaaatatcatcttgtgccaatcagaaaggcaattattaaaaagtcaataaacagatgctgcaaggttgaggagaaataggaacatttttatggtgttggtgggaatggaaattagtttaaccattgtggaagatagtgtagtgattcctcgagaatctagaaccagaaataccatttgacacagcaatccctttactgggtatacacacccaaaggaatataaagcattctattataaagatacatgcacacatatgttcattgcatcaccatttacaatagcaaagatgtggaattaacctaaatccccatcaatgataaactgggtaaagaaaatatagtacatatacaccatggaatactatgccaccataaaaggaagatcatgtcctttgcagggacatggatgaagctggaagctattattctcagtaaactaatgcaggaataaaataaccaaacactgcatgttttcacttacagtgggagctgaacacatggacacagggagcggaacaataaactctggggcctcttggggaggtgagggagcatcaggaaaaatagctaatgcatgccaggcttaatacctaggtgatgggttaataggtgcagcaaaccatcatggcacacatttacctacgtaacaaacctgcacatgctgcgcatgcactctgaaacttaaaatgaaataaaatttaaaaaaagaaagggaataatgccagaagcattgcaataaagaaaggacatttaatactcagaatatatcgatacttatgagaataaactcctgactccgcattcacccacggacatttttaaaatctcatgtcaaagaaccaacaaactgaaaagggtgaccaaagtgaataaatctaattatcaagcatgaactaggatactgctacaaaacaggagtaaataagacccaaggcaactcactggtgttcctaatactactttgctcaaaaggtttagccaataaaaaattacatctattaagacagtactgatgtagatacagataattcaggaaaaaaatagcttcagattaccttcacctcaggaaataacccattttatcagatttccagcaaaagataagaagaatatggaatacctgaaagaagaaagcaatgtttataaagttaaatcttgtgataagctgcaaaagagtggctctgggagtgagaagaattaagaataccagctatgctttaagtcaattttggttttcttccctttacccaacaccatgcccaaaggatttaagtctttgagagcctgacaaaattgacttgtattatgtggtatttttataccacattttctttattcatttgtccgttggtggacaattaagttgattctctatcatgatttctgttaatagtgctgcagtcaacatgactgactttattttattttatttatttatttatttatttatttatttatttatgagacagaatttcactcttgttgcccaggctggagtgcaatggtgcgatcttggcttactgcaacctctgcctcctgagttcaagtgattttcctgcctcagcctctcgagtagctgtgattaaaggcatgtgccaccatgcccagctaattttgtatttttagtagagacggggtttcaccatgttacccaggctggtttcaaactcctgagctcaggtgatcctcctgccttggcctcccaaagtgctgggattacaggcatgagccactgcgcccagcagactgactttatttttttggggtatatatcctgtagtgggattactggattatcctcaaagataagttagcttattatactttgtatatctattttgggaaggtgcattttcatcttaagaaaagacatatatatatgtatttatgtatacatatatatatttatgtatacatacatatgtatttatgtgtatatatatgtatttatgtacacatgtatataaacaaatatacactcacacatgtatatatacacttatatttatatataaaatatacatatagcacaaatacatatttgcatgtctgtatacatatatattaatatttttgtatattataattttaattctatttgtaacctaatctggaatagaacaataaattgggaaactctgggtacataatttttttcttcattatgaaatattttattacattcatttttatataacaaaagatttaaactacaaaaacaaaagcatgtgtatatataatattatattttactaatgtaattgaaatgaaacttttaaaagattgactgttcagtaattttctcttgtttgtttttattctatttttaattgacataattggacatatttatttggtacagtgtaatgttttgatacatgtataaattaggtaacaatgaaatcaggctatttagcatatccatcacctcatacatttatcatttctgtgtggtaagagcattcaatattccctgttctaactattttgaaatatatagagttaaccatagtcactccactgtgtaataaaacaccagaacttactcctatataactgaaatttaatatactttgacctacatctcctgaatgcccaacacccatagctctggttacctcaatttagctctctacttctaagagaattagagttcaactattttagatttcacatattagtgaaatcatgtagtatttgtctttctgcgcctgtattatttcaattaacataatgcctttcagattctctcatgttcctgcaaatgacaggattttattctttttcatggattaatagtattccattgggtatatataccacaagttctttattaatttatccgttgatgaacaattaagttgattctctgtgatggtttttgttaatagtattgcagtcaacatgactgactttatttattttggctatgtgccctgtagtgggattactggatcatatgggacttctctttttgattttttgaggagcctgcatactgctttccataatagtactaattttcattctcactaacaatgtatgaatttctctgatttcacatccacacgagtatttatttattttgataattgctactctaattggggtgaggtgatatctcatggttttgatttgcatttttctaatgattagtgatgttgagcattttaagatatatctattgaccatttgcttgtcttcttttaagcaatgtctactcagatcttttgattgttttaaaaatattgctattgaattatttatgaatttcttatatattctggatattaaaaccttatcagctgaatagcttgccattttttctgcattctgtaggttgtctcttcattttcttaattgtttactttgctgtggcagtagctttttggcttgatgtaatctcatttgtctatgttttcttttgttgcctgtgcttttggggtcttatccaaaaaattcttgtgcagaccagtgtcataaagtgtttcttttatgttttcttatagtaatattaccatttaggatctcacatttaatactttaataatttttagttgatttttgtttatggtgagacctaggggtttatcttcattcttcactgcatgtggacctccagttttccctgaaccatttactgattagagtacctttctccactttgcatttttagcaccattgtccatagtaagttcactgtaagtgtatggaattcttctgtgttctctattctgttcctttggtctatgtgtctattttgatgccagcaccatgctgttttagttactctatcttgataatatattttgaagacagaaaatgtcatgacttcaactttgatctttttggtaaaggttaccttggctattgagagtcctttgtggctccatatgaattttaggagtatctttctctgtgtctgtggagaatgtcattgatattttgataaagatcccattgaatgtatatcattttgggtactgtggatattgtaacaatatcatttctttcaatcaatgagcatggaatatctatttatttgtatcttctttattttcttttatcactttttttgcttttattttacacatcttttacctctgtggctaattttattcctaagtattttattttatttgtagctgttgtaaatggaattattttcttgagttctttttcatatagtttgctactactgtacagaaacactactgatttttgtatgttgattttgtatcctgcatctatattgaatttgtgaattagttctaacagttttttggtggaatctttagggttttctatatatataagaacatgccacctatgcagacaattcaacctcttcctttccaatttggattccctttatttctttctcttgtctgattactctggctaagtcttccaataccatgttgactacaagtggcaagagtggccatccttgtcttgttccagattttagagggcaagctttcaactattatattacccctgagttcatcatatatggcctttgatagattgaggtacttttcttctatacttaactttttgagaattttattataaagggatgttgaattttgtcaaatcctttttctgaatctattgaaattgtaatatgattcttgtccttcatttgttgatatgatgtatcatgtttattgatcttcatattttatgttcaaccattcttgcattcctaggatgaggcccacttgatcatgttgaatgatctttttaatattaataggctgttgaatttgttttgctagtatttccttgaggatttttgcatgcatgttcatttggaatattgattggcttgtaggcggttgttttggtttagtttggtgtgagtgcatgtgcatgtgtgtgtatgtttgtgtgtttgtgtccttgactgattttggtgtcagggtaatggtggctcagtagatgagtttaagagtatttcttctccttttatatgttgaaatagcttcataagaattggtattatgttttcattaaatgttttatagaatccagcagtgaggtaattttttttaaaggaaactttttattacttattcacatcttagtgctcattattagctgtgttcagattttctattgtttcaagatacaatattgataggttgcatgtgtccagatatttatctgtttctgctagcattatcctatatattggtaattttttgtatttttataatatcaattctttttttaaattttattattattacactttaagttttagggtacatgtgcacaatgtgcaggtttgttacatatgtatacatgtgccatgtttgtgtgctgcacccattaactcgtcatttaacattaggtatatctcctaatactatccctctcccctccccccacctcacaacagtccccaaagtgtgatgttccccttcctgtgtccatgtgtactcattgttcaattcccacctatgagtgagaacatgcagtgattggttttttgtccttgcgatagtttgttaagaatgatggtttccagtttcatccatgtccctacaaaggacatgaactcatcattttttatggctgcatagtattccatggtgtatatgtgccacattttcttaatccagtctatcattgttggacatttgggttggttccaagtctttgctattgtgaatagtgccacaataaacatacgtgtgcatgtgtctttatagcagcatgagttataatcctttgggtatatacccagtaatgggatggctgggtcaaatggtatttctagttctagatccctgaggaatcgccacactgacttccacaatggttgaactagtttacagtcccaccaacagtgtaaaagtgttcctatttctccacatcctctccagcacctgttgtttcctgactttttaatgatcgccattctaactggtgtgagatggtatctcattgtggttttgatttgcatttctctgatggccagtgatgatgagcattttttcatgtgtcttttggctgcataaatgtcttcttttgagaagtgtctgttcatatccttcgcccactttttgatggagttgtttgtttttttcttgtaaatttgtttgagttcattgtagattctggatattagccctttgtcagatgagtaggtttcgaaaattttctcccattttgtaggttgcctgtttactctgatggtagtttcttttgctgtgcagaagctctttagtttaattagatcccatttgtcaattttgtcttttgttgccattgcttttggtgttttagacatgaagtccttgcccatgcctatgtcctgaatggtattgcctaggttttcttctagggtttttatggttttaggtctaacgtttaagtctttaatccatcttgaattaatttttgtataaggtgtaaggaagggattcagtttcagctttctacatatggctagccagttttcccagcaccatttattaaacagggaatcctttccccatttcttgtttttgtcaggtttgtcaaagatcagatggttgtagatatgtggcattatttctgagggctctgttctgttccattgatctatatctctgttttggtaccagtaccatgctgttttggttacagtagccttgtagtatagtttgaagtcaggtagcgtgatgcctccagctttgttcttttggcttaggattgacttggtgatgcgggctcttttttggttccatatgaactttaaagtagttttttccaattctgtgaagaaagtcattggtagcttgatggggatggcattgaatctataaattaccttgggcagtatggccatgttcatgatattgattcttcctgcccatgagcatggagtgttcttccatttgtttgtatcctctttaatttcattgagcagtggtttgtagttctccttgaagaggtccttcacatcccttgtaagttggattcctaggtattttattctctttgaagcaattgtgaatgggagttcactcatgatttggctctctgtttgtctgttattggtgtataagaatgcttgtgatttttgtacattgactttgtatcctgagactttgctgaagttgcttatcagcttaaggagattttgggctgagacaatggggttttctagataaacaatcatgtcatctgcaaacagggacaatttgacttcctcttttcctaattgaataccctttatttccttctcctgcctaattgccctggccagaacttccaacactgttgaataggagcggtgagagagggcatccctgtcttgtgccagttttcaaagggaatgcttccagtttttgcccattcagtatgatattggctatgggtttgtcataaatagctcttattattttgagatacatcccatcaatacctaatttattgagagtttttagcatgaagagttgttgaattttgtcaaaggccttttctgcatctattgggataatcatggggtttttggctttggttctgtttatatgctggattacatttattgatttgcgaatgttgaaccagccttgcatcccagggatgaagcccacttgatcatggtggataagctttttgatgtgctgctagattcggtttgccagtattttactgaggatttttgcatcaatgttcatcaaggatattggtctaaaattctctcttttggttgtgtctctgcaaacacattcaaaagctagcagaaggcaagaaataactaaaatcagagcagaactgaaggaaatagagacacaaaaaacctttcaaaaagttaatgaatccaggagctggttttttgaaaagatcaacaaaattgatagaccactagcaagactaataaagaagaaaagagagaagaatcaaatagatgcaataaaaaatgataaaggggatatcaccaccaatcccacagaaatacaaactaccgtcagagaatactacaaacacctctatgcaaataaactagaaaatctagaagaaatggataaattcctcaacacatacaccctcccaagactaaaccaggaagaagttgaatctctgaatagaccaataacaggctctgaaattgtggcaataatcaatagcttaccaaccaaaaaaagtccaggaccagatggattcacagccgaattctaccagaggtacaaggaggagctcgtaccattccttctgaaactattccaatcaatagaaaaagagggactcctccctaactcattttatgaggccagcatcatcctgatataatatcaattctaatgtcttactttttatctctgattttatttatttaagttgtctttcacttttcctcagagtcaccaaagtttttgaatattgtttatcttttaaaaaagcaactgtttattttatctatattttgtgtttagttttttgtctcaatttgtttcctcttgaatatcatttattttcttctaataatttggggtttagtgtgtttttatttagttctttgaggtgctatgttaggtagtttatttgtgatctgttttccttctgatgtaagtttttattgcaagaaacttccctcttagaaatgtgtttaactgtgttctataggttttgatatgtttcatttccactttcatttgtcttaaacatttttaaattttccttttaatgtctttacccattggttgtttgggaacattttgtttaatttctacatatttgtaaagtttctgtatttcctctgttattgatttttagttttataccattgtgctcagtagagatacttgatgtaattttaatcttcttaaatttcattttgtctcatggtcaaatatatggtcaaatatatgatcaaatatattgtctcgtggtcaaatatatatctatatttgatctatgttctatgtgcaacagagaaggatgtatattttgtaccttttagttggaatgttctgcaaatgtctgttaggcccatttcatctagagtgtagtttaaatctgatgttatttttataatttattttactggataatctgtccattgttgtaagtgagatgttgaaattccctactattttagtatcatagtcaatttctctctttagctctatgaatattttctttatatatttaggtgctccaatgataggtgcatatatatttacaattgttatactctcttgctgatttgacctctttatcattatgtcatgaacttcatttctgcttcttttgtaaaatccaaagtctattttacctgatataagtacagctactctcactgtgttgtggcttccatttgtatgaaatatttctttctatcccttcacttttagtctatttgtgtcttgtaggcagcatatcattgggtcttttaaaaatccattgatccactctttttatttttattttttcatgatcttcattggtttatcattttagggatgggttccttctgtgttaggctggagggcagtggctattcacaggcacaatcacttcacactacagctttgtacccctggcctcaagcaatcctcccacttcagcttcctgagtatttgtgactacagggacatgcaaaacactgggttttattcctcttaatagtacagtttaatccattaatatgcaagatgattattgataggtacagatgtattactgccattttaaaaattttcaaattgttttatagattctttctttttacctgtcctcttgtgtggttaaataattttctctagtagtgtgttttgattttttaatttttattcttaatgtacctattaaaggtttttgctttgtggataacatgaagctaacaaataacatctcatagatataacagcttaaaataacttgttatatatatgagatgttattaactctgaccttaatgttttaagaaaaggactctacaatttgacctcactgcctccaatattttgaatttttatgtcacaatttgcatattttaatgttgcatatttcttaaattattttaatttttactatttctaatatttttgtattttaatctttatattagagatataaatgattcatacacaatcattgcagtattagagtattctttatttgactctgcacctatttttatcagtgaattttatactttcaaaatatttgtgtgtgtgtgtgtgtgtatgtgtgactcattagcatccttttctttcagcttgaagaacttcctttaccattgtttataagacagatttggagttaaaaaacaaataaaactccctcagcttttgtttgtctggaaaaatgtttatatctccttcacatctgaaggatggatttgctgactacagtattcttggctggcagtttggttgcttttttcctttagcactttgaatatatcaacccaccaacctcctggctggtaaggtttctgctaagaaatccactgatagttatattggcactcttttgtatatgatgtgtttcttacctcttggctgctttcagaattttttctttgtctcttttttttttgataatttgattattttatgttttgttgtatttctctcagggtttaattttcttggagacctctatgcatcccatatatgtgtgttggtatctatcacaggttaatgcagttttcagccattattcctttaaatgtgcttactggaccttttcctttgtcttcttctgttgattctattataaaaacattcaatctcttacatgtgtcctataattcccatagattttcttcattcttatttattcttttgtctttttatcctctgactggatactttaaaatttgcctttctgcttactgattctttctttctacttgataagttcttctgttaaaattttctattacattttttattgcagtcattgtattattcatttctaggatttctactgatcttctcatttttttcaaatactggtttccaaacttcattaaattttccatctgtatatttttaaattttactgaacttccttatgaatattattctgtattattgatcagtctttgcatagatctctatttatttgggattcattatttgagctttatttatttctttttgagaaattatacttccctgattttccataatctttgtattcttatgttgtgaccttcatatgtgaggtgacaagtccctttttggtcctgcacagatatattagcagacatagagctatttagtctaggctgtggtcctggaaggttcagctggtgatgatcctggagaggcagagtatgttataagttatccagttggctgggtcactgcctttgctttgatattgaatggggttactaactgggttctgctgaccagtgagaccattggttggactctgctgttaggtggtatgctggctcatacttcaatggcttctggttagacccggcaacatatatattccctggatgggcagttttgctatttgaaatctgcacttgagcagggctgaaagttggactctaagattaggtggagtcactactctgaacaggcaggagcttaggctgtgctccttagaaacacacaatttgagattgcctccttgtctgggtggagctgtggagtgggcttttggcttagttcagtggctgtttgacttcccagatcaagcaggactggcctctaagtttcttcaaaatgtacagaaatgggagtctctctgcctggttgggattgttttgtgggctatttgtcgtccctacttgccttcctggctcgagccagtctggcttctttgcttctctaaaatctgcaaagatgggaatctgtctgcctgggcggggtcattggccaggctttttggccatgtggcacctctgattaccttcccacatcaagcatgtgtagctccttcacatctctgagatctgtgaagacatgagtcttcctgattggacaggtttgttgttggttctggagttggctggggagactagctgtctaagggctcactgtatgtgagctagattgtgtttcctactgtgcttttaaaggtgacaagcttagctctgtgagtgagctaagaggttgattgatgcctctgaccaagtgctacagcttgcaggatgcagtggtaacaccaaaatccttgtcatttgctttgttttactcctgggtggtcaagccatgccatttctcttagtattcctcattaagtgagaccacagtggacttcctgagaagttttttagaatggtagtgaagtcagataactgtttcaagttcgtttttcccctcatagaaactgtgagtccaggaaaatctttatctggtgctatgctactttggtagaaggggaggtgggggtgcagtcagagtgagaccattcctcttagccatcaaatttagattttgtttacttctgcacaccacacaggtgtctcaggcttgtttccagatgctgaggttttcaaaaggatgttctgtctgtagatagtcgctagttgaaagttctgttggagcaatgggggtcaaggttttttctttgccacattgctgacatccttaagtttgaattaataatgattttattttaatgtcaactgaataactgatatttattttttaaaatattttttaagaaaacatctgaaatcacaagcaggttcatcatgaaaatataaaaaaaaattattgttagtcatgatctatgaaagaagcaaaatatcatttttttccaagtatttatgattgctgtctttaaggtttttttttctattattcatagtgatgatagttttgacccaaatatgatttcaagtcttatttgcaaatattttaaggcacaaccaggcctgaatgtattttctactgcccaatatagaagcaaattttgattaaatctaaaaacttttaataatgctggaaatgattatatgccttgcatgtaggaatttattatatgctatgtaatcagtatattggaaccctcattcaaataattatgcaaaactgaactttatttaaataaataaataagtaaacttttaaggtgaggtttcacttagttccagaattatacttactgaaatattactatattttaaaatttgctatatattataatattacttatactgatgatactgatggttatgaaaataaataaaatatatttatggatatgtcagtgtgactccagtgatttatagttgtgtttgtgttttttttttctaaaggatttgaacaacttgcaaatacaccatgctggacacactaagataagcaaaatcaagtaagaccatatgcaaaattgtataatttttaattgcgaagtttattgcatttaaagcactgaaataactttttaaaaaacattttatttcacatactttttcatattcttattaaaaacatgatctattcatttcaaacagacttatcctgaaactgaatatatagacgtactttatctggagagactcttgcaagtgatattgagcactatggtaaaataactttccaatattttatgtaattttaattgaaggaggatatacatacaaaaactttaaagaagttattgcaaatgtacaaattgatggattttcattaaatgaattatccttatagccatcagctatatcaagaaataaagcatcactagcccccagaagctaccctcagcttccctccaagtcactaaaattctccaagttgataatctttctgatgttcaacactaaatactttgtatatttgtgtatagtgtgcaagatggaattttactgtatagattattttgcatctggcattttttatttagtgagatatccagtcaatattaattttcatcattgttatgaaatattttattatatgaaaatacaaaaatagtgtgggtgtgtgtttgtgatctactacaaatgtgtagttttcagggttttttggctattgtctaacaacattggctattgtcttttttattttatttattctagtgtttgtgtactaaaatttaatcgtgattttatcttgaaggtctctgttgactaatgaggtagagcatgttttcctgtgttttagctgatccactttgtaggcatcttttccagtgtttgcatttttgatctcttgaattgtctgactgttatgggttgaattgtgttcctcaaaaattcatgtgttgagttcctagcacccagaacctcagaaagtgactttctttgaaagtaaggtcattgcagatgtagttaggtaaaatgaggtcatactgaagtagggtgggctctaatataatatacttgatgcttttattgaaagggaaaatttaatttctgatacacagacacatagcgagaataccatgtgaagattaaagaagacattgagatgccttagcagaagtcaacaaatgccaaacattgccagcccaccaccggtagctaggaaaaagacatgaaactgatttttttcctcatagcctttagaaggaacaaccttgtgacacattgatcttggatttctaacctccaaaactgtgagacaatacatttctgttgtttaagccactctgtggttatttgttgcagttgtagcaaactggtggactgtcgtttattgatttgtaagaatattgtatatattctggatatgagttatttgtcagtaatataaactgtaaattagtctgtgatttgtctattcattcttttaatggtgccttttgatgaataaaagtcattaagattaatgtaggttaaacgttcatattttactacatggcttatatatttttgtcctgcctaaaaaatatttgctcactcctagatcataaagatcgaaatatattttcttctagaaaatagtatttgtcttttatatttaagtctacaatgcactgagaattgagttttgtaaatacaatgatgtaagagtcacgatttatatttttggtatttaattggctcagtatcaaaaataaattcttccccatttcaatatatatcacatttttatgtgactccgtaagtcacataaaagactccataagcctttttctggcattttatcatattcttcttgtctaggtgtctatttctgagttaattgtatattatcatatttattatatatgtatattttataattatatctgaaaataaaagttcttcagcttctttaatacttctgcaagatttctcaaactattattggctctatttttcatataagtttcaaaaacaacttatcaagttttgccaagaaacctgctgggatttttgttggagttgcatcaaatcaatatattaattaggagagattacatgttcacaatactgacttttcccaaccttgaaccttgaatagtgtacttgtttagagagtctttaactgacagtttttacattttgtagttcgtattggaaggttattgctcgtcttctgttagatatgttactatgtattttatctttctaatgctattggaaacatttcatttttatcttctattttctatgtttttccttatagtgagaattacattgaatttttgcccttgctaaatttccttactaattattatgtatctataattttgaaaaatcctatatatgctatatgtagaaggagcagttttatttattgccttccaatcctaatgccactgtctttttaaaaatgtcttttattatcacacgatgacttccagtaccatgttgatagaccacaaaatagttttcaaaatccataaaattttctcagattaaaaatgcatgtaaaatttttttagtaaacattctgtcatttgctttcattcacagtgcagtcatttaaaatagtatacctagtaaccttggctcttcactccccaatcattctgcaactgaacacatactgacttcctctatcctatttcagtgacactataaatgctacctgccactctctaatttgcactctattgtataattttcatttcaattctgtattgtatctgtaatccttttggaagtttttgtttattgccttgtatgaagccactcatagtgttttttgacattagtttttataacaggagttttggagtcaggaaaggcttatatttgtgtctataaggagtttcttatttaaccctttcaaattctctaattctttaatacttttatcttctaatatatacttacaagacttttgtaggaaagaaatacatgtaaagtgcctagtacatggccaggcacatgacaaagggacaataaattatagttctttggcatatctatgtctatccttgtgctcctcaaaattaggttttcctgcaggttttcttttagaaatttgttcttctcattctaatcgcctatcttgagtaatatcttattgttaccttttaaaattcagcttaagctttatcccctttattcttcctgagcaaatctaacatattttcttctgtcatgttttcatagtattctcacttatcacttgctatgctttacattctaataacatatgcttatttcctcaaacttgaatgcgagttttttatttgaaagaaaaattgtgtttcatttctataatgaaaatcttgagacttgagctttcataaagtcatttaatcttccatttgcagatacatttttttcagagtatcactaatatatgtggctgcttaaattcattgcaaggattttattattatcattcaggtaaattatatgatgaaagtatattgggggtaagataattatccagaaaagtataaaggcagaataatatacacacattaatataggcttaccatttatgtcctatttcctactccattctcccttccttccttccttccttccttccttccttccttccttccttcctttctttctctttccttcttttcttttttttttttttttttctgagacagagccttgctctgttgcccaggctggagtacggtggtccaatctaggctcactgcaagctctgcctcccagattcaagcaattctcccttcctcagcctcctcagtagctggaattacaggctcccgccaccacacctggctaatttttctatttttagtagagaaggggtttcgccacattggccgggctggtctcaaactcctgacctcaggtgatccatccaccttggcttcccaaagtgctggtattacaggcatgatccactgcacccggcctccattctccatttctaaccagattctttccaaatttgatttttcaaacaatgccacattgaatttgtgcctccttatagaatacttgataggggtaggaaatgagcacttcaaattttaccaattttaccattttatcaagcgattctcctgcctcagcctcccgagtagctgggattacaggtgtgcaccagcacaccgggctaattttgtatttttaatagagacggggtttctccatgtcggtcagggtgatctccaactcccgacttcaggtgatccacccgccttggcctcccaaagtgctgggattacaggcatgagccaccgcccccagccgtcatttgttatatgtaaatatctgtttccagtttttaaaaatttttttaacattaattattattctggttcatttttaattgttgtgggtacatagtaggtgcatatatttatgtagtgcatgccatattttgataccggtataaaatagataataatcaccgcagggtaaatggggtatccattgcctcgagcatttattttttctttgtgttacaaaaaactctaattatactcttttattttagaatgcacaataaattattgttgactgtagttaccttgttatgctatcaaatctagatctcattcattctatctaactatatttttgtacccatttactgttcccactctcgtgcagctctcctctacccttcgctactcttccccagcctctggtaaccatcattctactctctgactccacgagttcaattgttttaaattttagctcctacaaataggtaagaacatgtgaagtttgtctttctgtgactggcttattccacttaacataatttgcagttccatccgtgttgttgcacatgacaggatctcatctttttattattatggctgaatagtactccattgtgtgtacgatcacattttctttatctattcatctgttgatggacacttagcttgcctccaaatcttagctattgtgaatggtgctgcggtaaacatggaaatgaagatatctgtttgatatactgattttcttcccttgggacatatacttagcagtgggattctacatcatatggtagttatatttttatttttttgatgaaccaccacattcttcttcacagtggttgtactaacttacattctcatcaacagtgtatgagggtttctttttctccatatcctcaccagcatttgtaaatgcctgtctttcgagtaaaagccattttaactggaataagatgatatctcattggagttttggtttttgtttatttctttgttttgagacagggtttcactctgtagggcaggttggagcatagtggaacaatcatgggctcccttgcagccttgatttcctgggttcagatgattctcccacttcagccccacaagtatctgggactacaggtgcacaccatcatgccccactaattattgttttttttttttttttgtagagacagggtttcaccatgttgctcagactggtcttgaactgttgagctcaagcaatccacctgcttcagtctcccaaagtgctgggattacaagtgtgggccagcacatccagcctcatcgtagttttgatttgcgtttctctgatgatcagtgatgttgagcaccttttcatacactgtttgccatttgcatgtcttcttttgagaaatgtatattgatgaaactagacccctttctctcgccatatacaaaaaccaaataaaaatggaataagacttaaatctaaaacctcaaactataaaattactaaaagaaaactttagggaaactctccaaggtattagagtgggcaaatatttttcaaataatattccacaagcacaggaaatacaaaaatggacaaatgagatcacatcaagttaaaaagctacacagcaaaggaaataatcaacaaagttaacagacaacaaacagaatgggagaaaatatttgcagactattcatctgacaagggattaatacccagaatacaaaggaagctaaaattactcaatattaaaaaaatctaataatttgattaataaatggtcaaaagattattgagcttttgacatcacaggttttaaaattttaagagtcaaatctaatattcaaaaacatttaacaaatttatccattaagttttgaaaactttttgtagcttcatataatatatgaatatattcatcgaattaaatgtttcctttcatattttaaaacatactaattatttgttattgttgattcattgaaatgctactacttttatattttgatacaattactctgctaaatacatcttagtttaaagattgattttcttttagtttctgcatcattatgagatttatattaaaactttaccattttcttttcattttctactttctgttactcaattgttttgttgtatttcttcaggtaagacttccagtatcctgtagattattagttacattagtgggcaagctagcactttgcgtatagtaggaaaatgactgcatttcccttctttaaggatgattttgcttggatttttgagaagtttatcaagctgctataatctatcacatttggtacgtttttcttagatgcgttttctggatctactgagagtttttcttttttttttcctataatcaattaatgtggagattttaaatgataacttaaaaatattaacctattttgcattcctagggtaaattgtactagtgtaagctttaaatttttattttgtaaataatacatagttttctatataacaaataagactatctctatcccatctatttccctaaaattagattttaataatatgtggaacatgtacattgtcaggggaaaagtttagactatagatttggtttttgaaaggctatttttttgttggaatttttttttattattcataaatcactcttatactcttaataattgtattagtttgctgcagctgcataacaaattaccagaaacttactaggttaaaacatcacacattttcttatcttacagcttccatcaaccaggagtctgtatatgctttacctggttcctctgctcagggtgtccaaaggctgtggtcaaggtatgtgcggaggcatattgtcaaaagaggtctaactgggggaagttaagctttcaggtttcttgggttggtggcaaaattcactttcttattgatgaataacttacggcagcttgctttttcaatgcaactgtaggatagaggatctttcaccttaggagggctgcaatccctcttttaagaactttaacctgtttgaattggacccatccaatataatctcctcttgattaactcagaatccactgatttgggactttggttacatttgcaacattctcttgcctttgccctattctgctagctagaagtgactgcttctacttgacatcaggggagaagacttttcaaaggtgtggctcattagggtatatccaccacaaaatgtgcctttataaaaatgatttgtgtaggatatgtgcataagtgtctcattttaatatttctaatacaatatatttaaatattttttctttgtttctcatccatcttgctgcggttgatccattttattaaaagttgaaagacatagattattgctttcattgatatttgacagtttttacaagaaaatcattatataattatgagagtgcatcattttcctactcatataaaaacaacagtttcctttgggacttagaaattacagatgagagatcggatcttttttaaaaaatataatttatttttttagaacactttaagtttcacagcaaaactgggtggaaaatacagataattcctatataagacttgctccttcacattcacaaacttcatcatctacattcagcacaacaggagtgaatttgttactgttgatcaacctacattaacacatcattatcatacatagtccatcatttacactagtgtttactcttggtgttgcatagtcaatgtttttttttcatcaaatgtataatgatgagtatgcaccgctgtagaaccatacagagtagttgcactgtcctaaaatcctctctgctctgcctgttcacggctcctcttttcccctgaaaccactgagtttcttactgtctccacagtttttccttttctagattgtcatatcatttgaatcatacagcatgtagccttttctgattgcgttatttcacttagtaatttgcattaaagattcctccatatctctgcatggcttgttagctcgtttctttttagtgctgaaaaataatccattgtctgggtgtgccagtttatttgtagcagtttgttcagctaccaaaggaatcttagttgcctccaagtttcaacaattatgaaaaagtgttcataaatgtccctatggaggtttatgtgtgagcatagtttttaactcatttgagtaaatactaagtagagctattgctagattgtattggtaagattgtgtctaattttgtaaactgccaaattatacaaattattctccaaactttctatagcatttttcatttccaccagcaatgaatgagagttcctattactctgcatcctcatcagcatttggtattgtgttctggattttggccattctaataggcataaaatgatatctgatggttgttttactttgccatactctaatgatatatgatgttgaagatcttttcatattcttattttccatcatattccttctttgatgagacatctatttgggtcttttgtccatttattaacatctttgttcctgttcttgttaagttttaaaagttgcttgtagatttttggaaaacagtcgtttatcagatgagtcttttgcaaatattttttccagtctgtggctgttcttttcattttcttaacatttcatttcctgagcagtttttattttaattaagttcagattgtcagtgatttattttacagattgtgcctctaatattatatctaaaaagtcattcccataccccagctcatctagattttctcttatgttatatttcagaagttttacatttttggttttacatttagatctatgttccattttgagctcatttttgtgaagcgtttccagattattatgtttttcatgtggatgcccagttgtgccagcaccacttgttgaaaagattattttttcttcattgaattatctttgctcctttatcaaagatgagttgactatgtttatgtgggtcagtttatagattaatattctgttctattgatgtagttgcctaataaaaaaaaagagccatcacaatatggcacaatttagcctttacttacgggcacagtttgtgtttttgcagaatggactctccatagcaaaacttaaagcgttttttttttcttttggcgggttgtttttgagttattaagtgtagatatggtgtgttcattaataatgaactaaatgactctcaggtttccccgcctccttgggaattgacactttttgtgtaaacaatttaaaaatgaactgggacaggtgcagtggctcatgcctgtaatcccagcactttgagaggccaaggtgggaggattgcgttagtacagaagttcgagactatccagggcaagagtgtgtgagacttcatctcctccaaaaataaaaacactatactccaggaaaaaaaaaaaaaaaagaaaagaaaaaggaaaagaaaaagagaaaaagaaaaaaaatatgaatggcaaaagacccagagtagccaacttattactgaaggagagcaaagttctactagaatttaagacttactgtaaaaccacaatatttaagacaatgtggaattagtaaaagaataggctatctgtccatggccataaatagaggctaaattgtgccacagtgtaatggctctttttttattaaaatttcttcgatattatagcaaggatgttgcaaaggataaataatgctaaattttaatttctttttttaatacttcaaattagtagtggcaatatttattcaattcaaattatctttgcttctcaagctataaatatatattcaagataaccttgtactgaagaggtaactcaagtaacttatactttttccactttacaagtcccctttcttggttataactatttttaggagctattttatttgaggacttcataaaagtaatgtttctgtgaatgactaatgagaaattaaaatgctggatactcatgctcttttatcactatgactcatgtagttaataaaaactgtcttattttattttattgcaaacataatgccatccacacagtacttaagtcaatatgatttcagtgacatctcaaaaaaataaaagtcaaaggaaacaaatataccataaaatacttctcagagtttctcataagtgaaaatagaacttcatcaataattgaatcaatctttgttattaaattcaactaaagaatctgttgcatactcctaactatagctctttaataaacaataattttcaatgcttttggaattgctgagatatctttttttccatggttgtttaaaattcacttggtttaatagttgtttagctcttataatatgccaggtacagttctaaattctttacaagtactgtctaatcacttaaaataaattcaatttttatataaatgagaaaaataagaacaaaatcaattaagtaacttatctacatagtagatccaggtttcaatatcttgatagtctacctctgacttaaaggagaaatcttttatttgtatacctaagtaagcaacacccccattgtgaacagactagcccatctatttgtatgcaaactaaatcatttccagtgacttcatttatcataagttactatggtctcaataaagtttcctaactctaatcacagtatctagaagacaacttacaatattgtcttacataatttcattaccctctattagatatctcttctttgattctctctaaggctatgtgaatttggtgcttttatttagctttgatccatattgttcaatggcccttcttcaccatggggtaatatgaataggataaatgtatccacgaataggaaaaaaatatattgtctttattcctctagatgttgcccctaatttggtgtatcacagcaatacccaaagattaagatgcaaagtctagggcaggagtgtccaatcttttggcttccatgggccacattgaagtagaattgtcttaggccacacataaaatacactaacattcctaatgatagctgatgagctaaaaaaaaaaaaaaaaaaaattgtgaaaaaaattgcaaaaaaaacacctcataatgttttaagaaagttcaagaatttgtgtagggtcacattcaaagccatcccgggctacatgtagcctgtgaaccacaggttggacaggcttggtctagggtcaggaatgcaaccctcctggggtaactgcatatttgctgcttcacctcctgaggtctataacctccactgcccaaatactataaaacagcaattccacttaccttttatttatctctattttcctgtttcacattttttctccatagatcttatcaagaagtaacatattacatatatttcattgtttatttccattgttctatgagttaatctagcttctctgagatgcagacaagatgaaattactcatgcaagagacctgccggggacaatgtcttggagggataacagaagggaactgggggagtctgaaaagttgtcagaccttgatgccagttggccctgggcaaaggataaaaagaacaaagtaaaggatgaagcaacttagcctgctatacagacctaagagacttgacaaggctattgtaaagttcttgcatcaaaatgtcccatcaaagaagaaccatatcaccctcctgaatgagatcacctttaacacccttgccttattcaatcgttggcacagagaaacaacagaaagcattcccttggcacaaatgactaattttagagcataatatctgtaattggcagttaattacatccctcacaaatggagatctgacaggcatgcatcaattctgtctctacctattgaagtacaggggcttctttattcatcgaactatgctaaacacctacaagagtacatgggtcacagtaataatcaacaaatgtattagaataaatgaattgtctctggcaaaaaaagatgtttgtattttctctaatgtcttcttggaaattagtcttcttccaagagctactggtcatctggaattatagactaccttgggggatgtctgaatcttcttgaaaacttcacaatagggcaagaaaaatttttttaaaggagctatttgaccagaaaccagagaagtgtccttgcagaacacaaattatccctaacaccagtcactgaaaagtaattacacggggtttcaatggcaactgaaacaagatgagtgctgatgagtttcagaatggaatgtgagcaatctagagttcagaatccttgtggtgtctatgttctacctcattaaacatagccagagtttcaaacagttgtattatcaaagtgcaatgtgctctattatttaagaatatacaattctgctaaagatgatgaaaaatagtagaatgggtaaaaatcataggatgtattaagcatacagagtgagcaagcaaatagcttatgagacaaaggaagaatccataaaattgttacgaataagttagcaaagtataatataaagtaaaagataaatagaataaatggtgtagataaaggcaaaagcaagagttctattatggatagaaagggatggaaggaaccagtaaatctaaaatattaataagcacaaatcatacccccttcagtttgacagtgaaattatccctaaatcactcacccattggtgacatttattatgatccaatgtggaactcctgtgtgctctactgcagaaatgtggttaataagcatggctgctctgcaaatcacaggcaaggtatatttactgaacaggcatactggctgcacatccttccaatagagctagtatacttggctccaggcatcctctttgtgctgaatccccttgctcaaatctcacctttgattctcataaccacattatcaacagagaaggatgttgtggcagagagagagtaagagacacaggacatatgaatattgtgtaactcagggtacattgtggtcattccacccaacatgtgccctattctaactgtgttaacctatcccatttctttgctattgatttatattattctttaaattgattcagtagacaatgtaattcaaaatcttaaggagatgtgtgtgactttcaactccaggagctccgtgatagcttgcctcatattttcctgaagattaccattgcaaaatggtgattttccacctgacacaacttgttctcattcaaaaaatttctctgtaaagtattacaggtaacagaataactggagccaaaattcctcttagtaaggaaacttatgttagaggaaaatagctgcttagaatagaatgtttaatgtagaatctcgttaaatgtgggcttctctatgacagttaatggaaagagctggacacataagagatgcagcaaattctttgaaagaaaaaaccaattcagtaaagaaaatgtgatacttactttaagggatttctacagaactgtaaagacctaatcctacccaacccagaagaattaaatcttagggaagcaaaatgatgttcattggaaatggaatatagattcaaacttaactagagtttagtgacacaaaaccttgaagtgctttcaggattacataaatttctggttaaaatttaaatctttcatctgatggagtagctcattaacttccagggagaagggaaaattatatgaagtagcttacaagatagaggttcttggcccagcaaaggttgataacagtggagagtgtgctaaagttttgcagagttattgatttcctcagcagacaggtgaactgagttgggcctatgtgacccagagctctttgttctggcaactcaggctgtgagcaacctttgacacatcaatttttgtcacggattattatgttttctgtgtgagccatgatatgaaattgctgggaatcaataatttatgataatacattgaaagtatcctgagcaatggggaatccacgtggagtaaagcaccaggctgtggggaatcctcagaggtcatcatatttctttacaacgtccccaaagtgataactggcaatatttcacttacagttgataataacttttagaggtggatactattatattgcttattttatagatggactaacagaggtcattcaaagacctctgctgaataacctttcatctttatagaggcagccaaaccacaatttttacaggggtaaaatgcacccagacaaaggattagattttctgagaatcagttgtaaagacaggtgattgaattttccaaagatgacaaacagtatctcctacaaaatatgattttctggaaatatgccactactcctctttaatctgcaaaggtttatgtatgcgtgcaggaagaggctgcattcaaattataccgtgtgatgttcaagtctaggttagcaaagaactcagcttctgtgctttatgttggatgtttactcctaagacacatcaatgaggatgacttcagactatttcagcctacatccgttaagttactcctagcttttcagtctgtctagctgaggcattaatcattttggagtagagacaagccattatttccacatcctttctaaattcctgcaaacataacaaaatggtagttcttttattctacaaagtttgaggtgattaatcagtgataataaatggagcagaagctaactatagtcaagtgaataagtttgggccaatgagatataaatgaaagctggaaattacttagaagttcctttttttttccttttgtatttttatttatttatttatttatttatttgagacagagtctcactctgttgcccaggctggagtgcagtggtgcgttttcagttcactgcacgctccgcctcccgggttcacgccattctcctgcctcagcctcccgagtagctaggactacaggcgcccgccaccacagctggctaattttgtttttgtatttttagtagagatggggtttcaccgtgttaaccaggatggtctcgatctcctgatctcgtgatctgcccgcctcagcctcccaaagtgctcagattacaggtgtagccactgcgcccaactggaagtttctttaaggaaacaaatggctaaactaggttatagtccctgtccttcccttttctacctttatgcaccctgaaatgaagatgtaaccatcattattagagctccagttcccatcatatagcattgaggatggaaacctgaagatggcagtagagatagacatataggagactaaatttttgttgacttaatcaagtcttcctagaaattcagaatcgttggccattagaattaatcttcgtgagagaaaagtagccagtatttaagacactgttatattggattttcttgtgtgtgctgccaatcttagaaatagttttttgcattttaaataaaccaagtcacttgcccaagttaattagtaaaaagcaaggatttgcactccagtggtctgtcttcaggaccttcagtttaattacagcatactgccctggaggcaaaagtgcacttgtcatgaatgtgaaatattataatgctttttaaaacatcaaaaataaaatctatcataatggtagaattttaaagatatagaggatataaaatattttatcatggagaaactctgcagcaattagactctctgccacctgctcttgccatcgtcatcatcagtcacagaagtaaatctttaatacctgtgaaaatttatattagactaaatatttttgttattctatcccatgggtattcagtaaaattgttttacatattgatttaatattatatgtatgtaaaatcttataatttattgaaagaaatggtatatattggggtcaagtttgtcctgtttttttatggattcaaattcattaaatatagtacagtcatataaacaaaaaatcctggttgtaaaaccaaattctaaaatgagaaacttttttacggccctaggttacaaataattaaggaaacatccaattcggtataagtgaaaaattcattctttctgattttctgtgcacttgcacatttgtaactcgctagtttcatttgcagcagagatattgaaaacacatttcaagagctcctactgatttgagaaatttattgtaccttaagggctgtcagaagaaatttgcaaattactactccaaattatttcaacaagaaaacatactgatatgttcaggtaatggaaaggggaaaaaagattaacgtaagtgtcataagaaagctattgtgctgcataaatcacaggtagtcaaatatgttgtgtaaaaaggatgctgtgctaaaatgcaagaaagaatatatattatactttgtttctcattcaactcagagtactcctttgatttcgatgttaaaatacacacttccacatttttccataccaagagtagggatttaagccatttctttcttccttaaaatactatttggtgaatcaaaacctgttggcttccatctacgaacatatagatatatttcgatatacatgaaaaaatttagttgaaatatttgaagattcagcaaacccagacaaatcaattaaagtaggcatcatgtttaatcactaatagtgggattaaatttagttgtattttaaagaaatggatcctgtgactaatgctttctttataaattttattgaaacaatatacttaatttaaccatcaatatagtcacagatataatgtactcttcaatacaaacaatggagaaaagcatttttaaagtattttaaaagctgggatctattaatggaggaacattgcttttttagggaaacacccgatagcctatcaaagtgtggaaaaaaattggacctaggcaatatgtgaatggaaacagcaagcacagagtattttcttcagagctgaactgctttgtttaggaaaatggaagctttctgtattagtcagggttccctagagagacagatctaataggatagatagatagatagatagatagatagatagatagatagatagatagatgcatgcatacatacatacatacatagataaatagatgagagatataaaggagtttattaagcattaacttacacaatcacaaggccccacaatagtctgtctgcaagcttgaggagcaaagagagccagtttgagtcttgagactgaagaccttggagtctgatgttggagggcaggaagcatccagcatgggagaaagatgtagactgggaggctaggccagtctcaccatttcaagtttttctgccttctttatattcgctggcagctgattagattgtgccctccagattaagggtgggtctgccttccccaccccactgactcaaatgttaatctcctttggcaacatcctcaaagacacaccaaggagcaatactttgcatccttcaatccaatcaagttgacactcagtattaaccatcacacttcctattcatttctatttagtttatttatttatttatttttctgagatggagtctcgctctgtcgcccaggctggagtgcagtggcgtgatctcggctcactgcaagctccgcctcccgggttcacaccattctcctgcctcagcctcccgagtagctgggactacaggtgcccgccaccacgcctggctaattttttgtatttttagtagagatggggtttcaccgtgttagccaggatggtctcgatctcctgacctggtgatctgcctgccttggcctcccaaagtgctgggattacaggcgtgagccactgttccctgccctatttagtttatttttcaaaagaatttttttaggggaaatcacactggtagtggaggtaatttgtttttgcagaaagaagtgataatgttgtgggaggataaaaatagtggattgaaaatgattgtagagcatcaaaacacccaattttatgttatattttctgttgtgttgtaattaaaattttcattatctgtgacttcagtaaagcttctacagaacaaaaccttatcaccttatttactgtatggtgcaagatgaagtatgtgcttattaaccctctatgtagttttaaagaatgtgaggaaagtgactgagctccatatgcaaatagaagcaaggagcaagacatcagtcaaattggacagaaagaaaaaacacagattttgggatgatttaaacagcttagagctatcctccaaccatcactatgactaccaagtctttcagggattagcagggatgcggtgctataatctggaataaaacaatactaaacatcaaataatatttgagtcatgtaaatttcaaaggttgtattgttgatacagaaacacctgctagtggaaatattgtcaaaactttgtgtgtgtgtgtgtgtgtgcgcatgtggtgtgtgtctatgtgtgtgtgtaacaaaacaacattgaactttggcaaatagacttgcttaatccaaaaaatatattttaagaaaataatacactgcattaaccttgcacatgtaaagtgattgtctgcattccttaatttttcccaagcattgttttccataaatgcaaataaaacactaaatcattttttccaattgagaatggtaatgaaaggatataatatgttttattattctaatatatttaaattaggtattttgttttggtagtgcctgacatcatatgtgtaccaatttaaacgaattatgtagtaagatcttagtgcggcagataagctagataattaaatgatctattcatctgtttataggtttatctgtctgaaacacaaaactaactcgagaagagtttcagtagtggtcgtgagataatatttgcactagatgaaagttgctcacatcttgttctcagtgcaatccttaagcaaaagaattctggcaagaaaatatccattaaataaacaatctgtgtttttaaaatttaattacaatgacaacaaaaagcatacttttagaaataagtccaaaatatatgattcctaatttaatgtaattaatactattgttacaatacataaaataaatatattgaatacattttaaaggcagaactaaagggcacatagaagcacactttcatttctaaaaaaaatctttaataacattgtgtaataaagcttattattcttgaggaaatatattttggtcttggggtagggttttgtttctaggaactaatgcatattttacttgagacaatttttgccagttttaactgaaatttaagattacttcctatccccaaattgttagtttgcattaacaagcttccatagacaaggcacactgattaaaaaaaaaaaaagctggtgatatttagcctgtagcttactaaaattatcaagcttataaaagatatgtcactatgttaattagttagaataatacagagcaaattactgtaaacacactatcagatggtattatgaataagtgttcttgaaagtcacttttatatgtagaattacagaaatgacctgcggagtaggggagatctagatgggccatagataagttttatagtgattgtataaggagcgtgatgtaaattccacatgaatagaatattatgataaagaaaacagttaagagttttgcagcatgggagaaatgagatttgggtccagttttggcctagcaactaacaagatatatgtgtactcagcaaattaattaaactttttgaactttagtatctttacttttatgcaatctgtttgatcttctaataactgtatataagaaaagtcacatttccttatttatccaaataaaattataataaaatttgagtctctcttacctaccagtttggtcaaacatctaaaatatctactcttaggtgttttattggttttttgtgttttttttgtttttttttttgagacggagtttcactcttgttgctcaggctagagtgcaatggtgtgatctcggctcaccgccacctccgcctcccaggttcaagcaattctcctgcctcagcccccatgtagctgggattacaggcatgcaccacatctggctaattttgtatttttagtagagatggggtttctccatgttcatcaggctggtctcgaactcctgacctcaggtgatccacctgctttggtctctcaaagtgctgggattacagctatgagccaccgtgcccagccaggtgttttgtttttgttgttgttttttttccaccgttttggactatgatagatataatttcttcttctatccttattgatacaccataccagttaagttatttaaacccttaaggcttagtaatatgatctgcaaaatgaagattataatagctatctcctgggttttttgagacttctaatatgaaaagtgaaaatgaactgattattgtagtatctattttatggcaaatgtccaatttagtttaattaaatttttgaagagtaaggtttttatgatatcatttcaataggaatagagaatagttctaatttattcttaacttgaagttttgaaaaaaaaatcacttaaagtcctctttaagataattattccctttgttaaggagattggttttattttaatataaaatacaatattggatccttcattttctttcgaaagccaaaaaaatagttgtgctaacattacctcaaatacatttctttgtctatagattattcaaatgtggaatatctttgtcaatccaaaaaaaaagatattaaatagattgttctgctttacattttattgttttcaatattgttttagttaaatggcctttgacttgtgctcataaaactttttaaagcaagacatttattttttgttgatttgctgtcataaaccaaaagtttgacgaagctgctaaaagatttatatagtatatagttaaagcattctagaaagactcacagaaacacaaagatctcctttgataagagaaacaataaaattactccattccgcattctatcaccctttccgggtcttgttcaaggtagttctggtcattgactcacgaattgagtggttttagataaagctgtccttggtcataaactctctcaaaaagtaataaaggggggatttctcttatagggcatagtgtatcttattttgagatgaaatgatgtgcaatgaccactgacagtcttttgagttgtgttaaaaaagaataacaaaaggcagctggttgaggaaaaggataagaatatattagaaaaggataagtatatattggaagagagatccagaggaaagcagaaaactgcacacttcattgctgcagaacacacaaaaaagtatagaagctgatgaagaatcagagagcatatgtaggtgtggatgtttaaaaaaatagcagtagagtctttgacactcctcctggttagtgttagggtatatgcttcctcccattgaatctgggcagacttttaactgctgtgactgtaatcgagtatggcagaagtgatactaaggcatgtctgatgttttcataggctgtgacagttgcacagactttctgtgattttgatgattttgacatttaagaagtactggtcaggcagctttagaatgtccctcacttgtgacctgtctcatatttttgtcatgatcagattagtgttatggaattttaggcagaaaaccatggaggtaaagtgccattctcatcatggatattgaggatgcacaaatatattattagaatgactcattactgttaatttttttttttttttttttttttttttgaggtggagtcttgctctgtcccccaggctggagtacagtggcgggatctcggctcactgcaagctccgcttcccgggtttatgccattctcctgcctcagcctcccaagtagctgggactacaggtgcccaccaccatgcccagctaattttttgtatttttagaagagatggggtttcaccgtgttagccaggatggtctcgatctcctgacctcatgatccgcccgccttggcctcccaaaatgtcattactgttaatttttaacttgattaccctgctgaagtgtttgtctggattatccaccattaacttactctttccagattcccttttgatactatactccttgaaagaaagtcaccgtatacagcccccttcaacaagtgtgtgttggcgggttatattccaccagattcagggtaaagattctacataaattatttgaaactcaacataatttttttctatttctcctcatttatttttatccaatcatttatttatattagtatggattgatgaatatactttgagctgttatccaatagtactttattttgttcctcaaactgtcccagctttggccattgttatcgtttggttgtttttagtacttttttactttgtggaacagaaagaacctctgggcttatattatatgttttgtgccccaattctagaactagctatttttccaagggactctatcttcttttattggagaatggtattagaaaccaagaccatggtgctagttataatcatttttaatggggtcccttcgttagctgacagggtaaagaaatatacaggtaaattctaacctgtatttaggtagctatcttaaaaagtgtccgcatctatcatctgtatctatattaaaataaactgagctcatactgattgccctaattcattaccatatcaatcatttcagctttctcatcttgcttatctgtaactttaaactcctatagtgagataccagttttcaccacctgctatccattaacttaattctttgatctcattatatttacatatacacatatatatatggtggtctcagtattattagttttatacaacagtgagaaatatctttatcaactagggtacagtatttacaggcagtacttttgccttcagtcttacttagtcattttgcctttagtcatttccaaagttacttaagaaagcaccattttcatccacctcatcattgaagttccacaatacaactctaatatagtttaatgctttggtcacagtctgttttgcatcctggaatcctttacctcctaaattatttttatcttgaatatattaaggtttgctgttttgttctaaacatctatgggttttgacaaatgctagtattatgtaccaccacacaagatcatacagaatagttttaccactataaaaactcccattcacctattcaaccaccttgcccaatctgatcctctggaagccactgatctgttcacatccttatagtttcaccttttgcaacatgtcttattattgtaatcatacagtaggtagactttcagacttgcttgtttcacttagctttctgagttgtatggtgaagctgtgctaggcttcataacaaatggccaaactggccactgaagtgtctgtacaattctgccttcccaccgacgatgaataagagttcagtttctgttgttccacatattatgagcaattagtatagtcttaaaaattgctattagaatattttatagtgatatctcatttttattttgatgtgcatatttctaatggtaagttttgttgagcttcttttcatatacctatttatcatatttatatcatctttggaaatgtgggttttcagaattcttgcctatttttaattgggctttttgttgggttattattaaattttaaaaatttccttaaagtttaatttgattttttaaatacaaggcctttaatggatatgtagtttgcaaatattttctcccagtcttgattttttttttttgctttttttgttactgttttctgtctttcacagagcagaagttattaatttaataaaggtcaactgattaaattgttttctttcacgggcattttttggtgttttatttagaaaattgtcacccaaatcaagttcacgtagtttctctcaaatgtttcattctagaatttttagggttttctatttaacaatgagatctatgattaattttgagttaacttttggaaaaggtaaagtttgtgttcatattctttttttgcatttgaactttgaattgttctaccaccacttattaagaaaaactgcccttttgccattgaattgcatttgctcctttgtcaaagtttcattgttacatttgcattgatcagtttttgggctctattctgttccattattctgtgtgcctgttcttttgcaatatggtactgttttagttactgtagctttatagcaagtattgaaaatggatattatatttcctccacatttttttctttttcttcagtaatttttggctactcaatataaatttaagaataactttgtcaggatctgcaaaatatatcttgcctgcatttagattggtatatgtgttgaatctataaattacattagtaagattggtcatcttaacaatattgagtctttcaaacaatgaagatggaatatctctccacttatttagaacttccttgattgaatgcatcaatgtcttctaattttttatgtatcaattctatacatatttgttagtgttatacttaaatatttcatttttggttgatttaattaatgatacttttttttcaaattccaatcattttttgctaataaagaagtaattgacttttgcatatcatccttgtgtcatgtagtcttgctgctgttgcctcctagttccaggattttgctgttgattctttgtgatactttacagatagtcatgtcatttgtgaatagatgcaattttatttcttcattttcaacttgtatatctttcatctcattttcttgtcttattgtgctgggaaagatttacaatacaatgtttaatataagtgttctgtgagacattcttgccttgttcttgatcttagggggagggagaccagtttctcaccattaaatataaactgtagagttttgaggggtgctctttatcaagatgaggaagtttctctgtttctagtgtcccaagagtgtttttttattgttgttgttaataatagatgttagctcttgccaaatacttcttctgcatcatttgatgatcatatatatattacatatatattttttctacatcacttgatgagctaatatatatttataatatattatatagatagatagatagatagatagatagatagatagatagatagagtttttctttgttaacacttagatgtggtggattgaattgaattgattgatttgcaagtgatgaaccagcttgaatagctgggtatatcccacttggtcatgctttattcacttttttcctaaatgtttggtaaaatttaccagtgaaactaccaggtttggtgcttttttaaaaacgtttttaactattgatgtgacttctttaatagatatagcactagtaaaattagctgtttctccttgtgagagattctgtagttttgttgttgatgtttttcaaggaatttaaccgtatcaactgagttctactattttggcagagttcgttagtatcccttcatcatctttttaatgggaataagcaatgataggtgatctttgatttttgatgtttataatttgtgtcttctatctttttattttgattttcttgaccagccaagaaccagcctatgatttcatttatattttatgttatctttctgttttgactttcattaattttcttctagtttttattatttattttattccttctctctcatatattattcatctgttttttcactatgtctacttcatctgttagaaccctggagtcattaatcagaggtgtttttaattcttgtctgatacaccatctgtttcatctctgagtctggttctgatgattgccttatctcttcttagtgtgtttttttctcaccttgtggtattttttgttgaaagccaaatataatgtattaggtcatataaactgaggtagataggtcagcaaaagagtttgtgttaatctagataggaatttgactgtacttaatatttgctatataacaagtatcagagacattcaattgtgcagcatcattgtttttgttatttttcctttaactttcatgagcactcctcccttataaacagcctgtttcttgaagcgctttcagccatatctgctattaatatacagatggatgtctcattattcaccatagtttatgttctaacaaatactgtgccattgctgctaaaggaaacacagagttaaattcccttgagcctcttaccacattttcacccactgaaatgctttttgtgttatataggtccatttactatcatccttaaaaagaaatccactgtcatcaaggttgaaaacctgtttttcacataacccttttcccatgtaacacttagcagattaaaaaaaaattactttgcagcctcgtattctgcagaaactgcctcacctataagtttaacatttttgtgctatattattttttgaaatgtgtgagtcatctggtacttgctaagactggtttagcatttctctcatcctgcgtagcatgattgttcatttctttggcttttgacctcaaaacgacgctgtccattatgttctttttattattgttatctcatgaatccacacacttagccacttttgcatattttcaatagctttatcacacactgtagatgttactttagcactctttagataagcctcatgtacagattggtgaatttcctctttctttttatggttgtaccatactgtgatgcataacattgaactcacaaccaacagtactataactcatgcctgaatgaaacaaatctaacacatattttttttctataaggcacatcacagcctttttatatttacttggaaaccctagacaccacttcatcttttcccttgtgggccattttaaataatgagatcaccatcaccaataacaacaaaaatcaccaacgattttttaaatgtagcactaattagaccacaaaaaggacatttgcttaaagtatgagagcttcttgtttcagctcttactttgttccacctcagctgggacatatatgtcaggtgattcaaatttttcagcactctgcatgtctgcatgggatgtgattataaaagctccgagaggattgagttagaggttacaagtatgttttagcaagaaggaaaatgaacaaatacaaaatctccaaattatgaggatccattctacccctgctgctctgacagcggtgtgggaagggaatcttataatttaatttcagtattttatggggcctgtgtgtctggggtgagaccttcacaactctttttccagtggtatagctgttttccccattcagctggaactggagagtaagaggaggctacagttgaaggaatgttcttccttcgttgtgataagaatctaggaaagtcttttctactgaaaaatcggcttttgtaatgcagaggtttctgaaggactctctcaatgactattcttcccgtcaaaagggaatcattctgggatcttcattttgaagaccttatggagttcctggaggtaaagctcaggaaagagtagcgggcctcctgaccgagcgcggtgtctcatgcctgtaatcccagcactttgggaggccaaggcaggttgatcacctgaggtcaggagtttgacaccagcctgaccaatgtgttgaaaccttgtctctattaaaaatacaaaaactggccgggcgtggttgtgggtgtcttcagtcccagctactcaggaggctgaggcaggagaatcgattgaacctgggaggtggaggttgtagtgagctgagattgcaccattgtgctgcagcccaggcaataaaaacaaaactccgtctcaaaaacaaacaaacaaaaaaaaagagtaggggcctcctaagactgtggccaccataaaagtctcacttttaagctagcccatagttcagcctctagaaaatcttcaaaaatcaagtgttgttgtcactttatggtcctagcagcttctgctccaggtaatcagatcttagcagtgtctgccaaatgctctaaatctggaaagccagattccagggtgattatttgccttgcaactgcaattggctgaaaggttcaggaaacataatttatttgggagtgatgacttgtaaactctttaccttcggagctgaatctagaaattccattctttttaaaataaatttatttattgtaatttaatacaatatccaaatgtatacagatcatgcatatatatgccaatgaataattacaaaataattacatttgtattgtagcaggaggagtcatagagaaaatccctcagatactggattgaggaaggaaaaacctttattcagctgggagcatcagcagactcacatcctagaaaccgagctctccaaataagtaatttctgtcccttttaagggctcacaactctaaaggggcggtgtgagggggggtggttgtgatcgattcagcaagcgaggggtgcgtgactgggggctgcatgcactagtcatcagaacgaaacagaacagaacagggagtttcgcaatgcttcctcaaacaatatctgcaatctatagataacacaagtggtgaggtcaggggttgaattttaattatcatgcccaaaatgtggtgccagtttgtctgactatgaatttcactgctgcttattctttcaacttctacctttacagtaaacaagaaattaagtataagacaatatgaggaatggtttcctctctcattccccgctttgagaacctcactctctagtgggagttctcactttcatcctcactacctatatcttcctgcaagacagatcaatagtgattcatatagtacacatgtgctaaagcattttggtgaactaaggtagcaattaagctttttatcatttgaaggagtacaggtagcaagcaagggagtagcaggcaggttcctatcactactataattcctattataagagttttaaatcctcctatcgctgggaaccattttccaaacatagccccaggatcgaatccgtgccacacttgcatgggcacatgtgtcagctttgtcatgtctctgactatgtcttcgactacttgcccttgatcatctatgtgtagacagcaattagtaaggttaaattttccacagacccctccttcagctgccagcaagtagttgaaagccagtctattttggtagatagcatttctcatctgagtttcttgtcaggctggtaaagtcaaggcttggccggttttattagtgatgatttctaagacagcttgcaaccatatgattcagttgagcatgtaaatgggggtccagtatccccatgagctgtcttgtgcccacgtagcaggcccatagtactgtataattctttcagggggccattcatcatctttccaattacctatggctatgcttctcctttcgcaggaagcgtagacagggaagcctggaagttcgcctgtttttatgggcagtagaagaaagatggtttaatagtaacaataacacaactacctgtccattggtcaggcagcttagcatagactctatgcccacacctccagtataatccagtgagagctgtctaatcccaatgggactccaggtgggtccacatggtcagcaactttggaaatttactaaatagattgttttcagtgaagtttgaactccaccaaatggctgttttggtagcactattatacagtttctgcccaagacaactgagctgtcctacagggtaggtaattcttttccttctctagctatgcaatattgtccaattattgaggtttttaggacctagaagttatcaggatgattcttttgggccaggaattcattgggaactgggtctgtaggcactaattctcgggcttcccatggccactgatctcccattacagttcttccacaaacatgacatgaagtgacattaagagactaagctacatgctcggctaattgcaaaaacaagtttctagtttttcctggaatttctggtaccggtacatttagttcatcatagaaagtttgaaatactggttggggagagcatttttggacttctcctcatatcaagatatggactccaggatcaagaccggtcccatcaattcctagggttacatattcccctgttttccagaagggatctagtgggttagcaattattagttctaatgggttgcaatttccactagtgcaataagagttactttttcctttctggaggttgacgaggtcttttcatcttttttccaagtagacgaaatgatgcaagaccagtagaagcaacctccacaatttcctagttcatgacatatatacttattttctggtgtatagcttttttcccaattgagggatccgcatcctattcctaacctcttgctatgaatgactgcacaagcatcaaactttaaaataatgtttttaggaactcccctttcttctaccctagttagtactttacttgtatctctttgaaatgaggtccttaaccttatttcaaaaactgtgaacatgggaggctcagaggggtcatggcacatgtctggctggtcatttcctgggctacacactttgtattgaatgttgttatacaaatatgttccttttaaagttcccaagcattcataataactatggaatagatagtcttagtttgtttccctacctctgtaacctgatggaggtactgggagcaatcttccatttggggaaaatcagtcgaggtttttattatacaagtccaaatctctagaaaaatgagtctcacgatgagtttcctcatgcttcagccgtgcatagaccagtcagcttccaggtatgactggagctgggcttgtcatcttcctcagagttactttgcaggggttgtccgggctcggttttgcctcccaggtttcagcagccgcagatagtaagtcggtgtttcgccgggcctgacgtttgccttctttacagttttccctgcggctggttgcatctttgttcacaaacacttgattggctatttccagtaactgtgatgtattcataactgcaaatccggcctgtttctgcaattttctcctaatatcttctgcactttggctaactagggccatgttaatcatgtgctgattttcagggctgtctggatcaaagggggtgtacatatggtaagcctcacacaatctctcacggaattgtgccagactttcctcttttccctggataacttcagaaactttattcatgtttgtagcctttgagcccctttgtttagatcttctaataatgcctctctgtaccgctttagcctttccatatctggcccattgttcaggtcccactgggtgtctgttcctggcagctgaattcttacgtattcttgagggttttggaaatcggctgggacgtgttcttccagccacttggttgctgcctggagtaccctttgcctctcattggtaataaagaggtacatgagcagctggtgacaatcagcccaggtaggattgtgagtctgtaaaatggtttggagcagatcaattaaggcctggggtttctcagtataagagggtgtattgtttttccaatttaagaaatcagcagaagtgaaaggctgatacagaaaggcacgtctttccaccatgtgcctgtcctcatcttccccagtacatcgctgctccctcaggggtgtttggattccagtcttaggtcataagtgggctgtcaagggagaagatttcctgcagcttcacttcctcttttgtctactctgggtggtctaggggtgtggatgtcttgcgagggtgtaggtgctatgggctcaggagtggggagccctccttctcagtaaggggggaccatcagtgccatctcctgccaggagtcatggggcatcgggtcagataggactttaggtgccgacctccctcagcaggtggagtgaaaaccttcctgaactgactatccctttgctactagtactgctgctgcctgccctcttagccactgagagggatctaaaagtagctgtaaccaggaatctatatacgggaactgatctgggtgcccttgcttacaggttaccttgtgccataccttcgagacaagggacctacccaggcttccttctgatggccaactcacttctaagcctggccagtctatttcacacagttttaagtaagtttccctggtgtcatagtaactccataatccccattaaatccctttttgaaattctttggcatagttcctaatggggtgggcttactttgcacctgacccatgtttttctcacactctcaccacacacacacacctcacacaacgaagaacgagtaaaagggcacacacacaactaataattaaaaccaaaatctgagtatcgagaaacccgagccaagtcaaaaccaaaaccagaaccaaataccaagcaatttaagttaagaccaaaaccgaagtaccgacatgggcacgtcgtgggtgatcaggccacgtttccactcaaatggagtgggcaaattccaaagactagtattaccaagttttggacgtctggaccccttgtgccagttccttcccagtgttcagctgctgcgtggatccctcctcgggggcctgccacacgctgctctggcgaggcatcccaccagggcagttgcctacctgggagcgctctttgggtcttcatcactcaggctgggctgagtcccccgcagggatgctccacagggcaggccaaagccacttaagcggctgcctcgaccctccgtcaatcacctctcttcccggtcagggaaccaagagatgtagcaggagcagtcataaacaaaatccctcagatactggattgaggaaggaaagaggtttattcagctgggagcatcagcagactcacgtcctagaaactgagctctccaaataagtaatttctgtcccctttaagggctcacaactctaaaggggctgcatgaggagggtggtcatgatcgattcagcaagcgaggggtgcgtgactggaggctgcatgcagtagtcatcagaacgaaacagaacagaacagggagtttcgcaatgcttcctcatacaatgtctggaatctatagataacacaagtggtgaggtcaggggttgaattttaactaccaggcccgaaatgtggtgctggtttgtctgactatgaatttcacttctgcttattctttcaacttctaccttttcagtaaacaagaaattaagtataagacaatatgaggagtggtctcctctctcagtgtaaacatgacacacataatgtcatagaatactaataacatactagtagtcccaactgccccttcccaatcaccattccattctttctttccaaaatactgactacattatatgactgcaacttttgtacaatgttatttttagtatttatgtaagtgacatcattcatcattattttgtgtctggctttttcaatcaataatttattttaatacttatggatgctgttgcatatagcaacaatgtttttgtctttattgctgtatggtatttattttccagagatatgacaattagatagttgtaattattcaatgggaatttgttttttctctagttgttaatctgtttcaatgtgaatgattattctagaatatgttatgtggactatatagtaggcattatttaggagtataattcctagatcatagttaaaagaatagtttattttagtaaataatgccaatcagctttccaaagtgactgcacagattttcagatttttatacaatctattgtatacatacatgaatgttaaccaattaacttcttctgatacataggcaagaaaaaatccaatttaagttaattataactttatttttaaaggttttatttcttaaagttttacttctagagacttgcccagataatataccttcaatattgcatatatatgtttattaattgtgccattatttattattgcaaaatgaaaagattaaaaactctacttgctcacatatgcaattagttaagtaaactatggttgaataaactgatagggagagactttgaggatatattattacgtgaaatttgccaaaaaaaatccccaaacagtatgtctatttttatatatttggtaattttttttaaaaagaagacaaataaccacaaacctatgaaagtgatagaggcatggatgagtagaaatgaaataaaacgcatgtgagagggagcaaccatattctcggttcaccttttttattatgaatttcactattataaccatgttaatgttcacatattcaaaaattatatttaattcaataaagatagaaaaaacaatatattatgaagtttgtttagaacagttaaagatactttacaattatgttcctaaaattaaaataatatggtgggttaaaagctccatctttgaacctatttttaagcttagaattctataaatgaaaatcctttccttctgcatggaaggtattttcccttcagctgtgcttttgctagctataaagttaaatatttgaactgaaggaaatatattctgaaatataataaaaataggctattgaaaggaaatatattctgaaatatgataaaattaggctattgagaggaaatatagtctgaaatacaataaaattaggctattgcgattggcacaaaactctaatcctcattatactgttctcaactttttcatggagctatagaaatcaactacagctccttttttttgaactgttatattacaacaacagtgtaaaaaaaacgaacttttcatgcatgtatatactattaaaaaatctatgttacttactattctagaggtgatatgtaaaccattataaagaatttttgaaatactactatattttgtttttcagtagtgcttaaagctttatggccgggcgctgtggctcacgcctgtaatcccaaaactttgggaggccgaggcaggcggatcacgaggtcaggagatcgagaccatcctggctaacacggtgaaaccccgtctctactaaaaaaatacaaaaaaaaaatagccgggcgtggtggcgggcgcctgtagtcccagctacttgggaggctgaggcaggagaatggcgtgaacccaggaggcggagcttgcagtgagtggagatcgcgccactgaactccagcctgggcgacagagtgagactccgtctcaaaaaaaaaaacctttataaatcaataacaagagaggttttagcccagtaggctgtaacagcttgtttgaacttgttatgatccattttgtcaataaggtcttgggagatctttaaacctgtgcttatttgactattaggtatacattataaccatatgttgaattaatgtttacaacatataggtgtaaaaaagaattgaaactcctttctccatgatatttaaaaaaaaaatgattttaacaagcttttttgtttgtttgtttgtttgtttgtcttttgagatgggattttgctctgttgcccaagctggactacagtggttccaacataccttcctgtaaactaaagctcccagtctcaagtgattcttcctcctcagcctcctgagtagccaggactataggcacacgtcaccacactaaaccaatttttaaaaacattttttgtagaaaccagtctcaccatgttgcccaggctagtcttaaacttctggcctcaagtgatcatctcaccttagtaaatatattttattccctaatattaacacattaaaaatattcactgtcctatggactgcttaacatagcatgatatttccagataatctgtctgttaaaatttcagtgagttcttttcagtgcttgagggtaatgtccaaggataatttaaagggtatttgtagatatcatgcaggtataatgcaagttcattttaaagctgaaagaaactgggactcagagttcttaagtgataaaatcgggatgcaagaccggattttctgcctccttgtccaacttttttctacttcttcgaaggttgttaatttttctatttcttttaaaatatattagggttttgttgggttatcttcatgaagatataaattaatatattctgttatatttacatgcagttgatatatttaatagtaacatcaacttattcatgcaaccattaatttctttatcaataaaataaatactttcttgacacccagtactttcaaaattctgtaatagacagctgggaatgaagaccaataaaacatccttttattgtcatgtcaatgtagcaaattatgttttagacatggtatacacagaagtaaataattacagtggagaaattgctcgactgaggaagtgattgcctcagcctagatcaataattattacagtagagggagtgacagaaatattcacaaagcaacacctaatttggaaatttgaacacattaactagctaaagaaccagagaacaaagatattgtatgccaaagacaagactgtttcatcaactttggtgtgatttccatggagatgttaactctaactagattacttgatatcaggaataatttgcctcctaatgcccatgtatatgtaggatgtacttagtattggcctttctagaattaacatctgagttgcctgtaagtgaacccatcacctatcagaagaaaatattggacagtaaagttgctgcacatcttatctccaatgacactgcccatgtgattgaataccagcagtctagcaatctaagtatcttataagaaaagtcattttagtttggccgatagaaaattcttctaaactatgtttctccattgagtttatttacttttctaagtttttcttcttgaagtaatgtaaaataagtcaatatcctcttctacatggcagctttgacatattttgtatgtctttaaaagatggcttatggattttggaggtcttagtattccagtgatttcattctttcattatttatcctgttgctatgttctctaagacacattcaacagtgaaattatatgattcagtttaccttattaaacaatagagtatattaaaatatggcatctgattgcctcttctgaaattaggatgaactggaaaaaagataaagaggaaaacagaagatagcatcagaaaaacaaatttcaagcaaatgtttttacattttctaaccccagtttccatgtttaaataatagaaacaaaaacatctacttggcaaacattttacttagattaaatgaatttgaatttaataagataaagtatgattatgacaggcatagaaaataataagtttcgtcaaggcagttctctaaaaaagaagttgcttgtccgtaagtgtttttatgcgtaataattctggtgtgtcttcataatctgagattttgatgatcctgccatttgtctctacattctgccagtgctctgaacagaaggtgctttatttaagccattttagtgtgaaaaataagtacttgatggggacatgctttgataatgaggtaggagactggcaagacttgttttctagttatcctgctgaccaaaactggatctggtccagacaggaaaaagtgaaaaaaacagcaggaaccagcagacagcaacaaaagcaatccctagctgccttcatttctcattaggataagacacttccaccggcaccacaacagtttataaataccatggcaacgacctggaagttaccaatcctttccatggcaacaacgcagaagttactgcatatttcctagacagttttaagtaacatgcccctcaatttgcattgactcatcctttaatttgcatgtaattgaagtgggtttacatgagtataaatacatttgccaagcacccactgcctgtaagttatacctgctctgcaaggagcagtaccttcccatacaagattgctgtctaacaccaccagctagcccttgaattctttatttggcaaaaccaagaactctcccaggctaagccttaattttgggtctcacccgtcctgcaacaaaaccatgtctttccctgagtggacaagttgaaaaaatatcaattattttaccgtgcctttccaacactttttgactaccatgacatggtaaaggcaattgtgccaattgttaaattgattaatatttcagattgtgacgaccatgagatcctatacaataacttggaaaattatctgatgtagatttgtagaaaaacttgctacacatgttttaaaggacttcaactccttttggctgaaaattctggaagaaagaaattattggcataaccatgaccatccagaaaacgttgttgatgcaatggctcatgcaatttggaatattttctagtggtccctgttgactaatttgatcttactaagtaattcaataccacttgaacatattgtagtgctggagaaatcagtagcagcagtgtgaaactagcaagaactccacatttgaagaatactacctttcctacaggaatcccttgaactttagaaaattgattaatccctttgagcttaagttttctcatctagtaataaaatgcatatcccaatagtttctcttcactgcattgttggaaagattaaaggaaaaatgagatctcatgaaaagcactcagctcagtattgagcacacagtgagctactgataagtatgagccattattgcttcttaagtgttgctgaaaatggatatttttcatctttgtggtgttgcagagcagttgaaataatgaagagttgtgaggaataatttttaaaatagaaataaatttaaaattacattaatttcaaagctgtaccagttagtcaattaatgggcatattagttaagtacatgtggactacaacaattaggtagaatttttccctctatttcactaaacactatcctcatcagaattcattttaccaaaagcagttaattataaacaatatttacatttctaggccactgaatctttatattttgggaagacaggtaggggaaagatatttccttttcttagaaaagtactcatgaccagttagccactcttttctctagaatttcacgacttccagtactccagaagggtcagcaaaaccgagataatgaagtcctgatctggacgacatgtttcacccataaaccccaaatgttttttctctctctctctttctctcaatctcaatctttccctgtccctcatactctgtctccctactccctaccctcatctctctatcacacacacacacatacacaagtcttctttttaatagtaatttaatttctagagttcattctgcaatagaaaacttattgtttcaatattgagtattgctaatggcttccgtgtggtatcttctcctttcacataagaaaatagatttattgagagacatttagggaacagttttacgcttgctaatggctttaattaatacaatagcattaatcagactatatagttgcattttctttttaaacaaatgacattttaattttaatccaataacaatacgatagtattcaatgaattgtccccaaagtggatatttaaaaatacatattgatattttagttaaagacaatcctaggttatattgaaagacaaatcagaaaaatctaaaacagtgtagacatttgttaaacatttatcaaatgtatctattttctttcattattacaaagttatattagttatttaattaaacagcaaatatacttgaattcatacacaatttaaaatcatactttattcactatttctagaaacagtcaaactacttagaaacctggacttaaattgacattgatttttcagtgatctctaaagcaaataatttaccttttttattttgccatggtttacatttttatctcatgccattttctccatttccaaatgactatacaaatttttagaaagaaataaagaatactacaaacaaacattaaaatgatttaaagcaaagagttctcatgtgcaggaggttatctttatcaacaattttttgaatagtgcttctatatacattattgttttataaagctcttgatattaataaattctctaagatgggaaaagtaaccttcttacattgttactgaatgcattgatagcaatatacaactagattcaatgatttatatttcttcatcagattttcagtttgtggaagaaagagtttgttacctggcacaaaagacctaatatattagatttaacttcgtcaatgtagaaatatccacttctagacacaatgcttttctcttgattgcatctaacacataatggtatatatagcctgaattcatagttcaccatcattttaacaacattttctgtgtaatcggtgctattttgttaaatggagtttatttgaaactgtccattacttacaagttagtaagtctgtcatttccttgttagccaaaaggagttaacttctggtatattttgctaataaaaattcacaaatatgtatgcattttaaaaacatctacacgtagtattctgggttataacaaaggtaaatattataccttctctgatgcttcttttggttgctatccaggccacatgtgtgactggagcttataaaatttgagaagacaggagcctttaagtctgtgattcccaatgtggctgactctcagtcccctgctagggaattttggaaatatctgtacattttttaatttctcatcaagtggaatctagtgggtagaggctgagttttgataaacagcatacaatgcacaagatacctcccaacacacaccccaggaattgactgtctaaaagtgccaagattcccacgttgagaaatactacttgaaataaaagaataaaatttgttaaaaataaaatacaattagatacagaagtaagtgaggaactctgtagaacaagcttctttaattttgtaggtaaaactgctttagcgattactccaaaacaaaattccaaatcaaacgcatttctttttgaataatgaattaacccttataaatttctacctctggcagaaggtttttgaaaagtaaagaaattaatgtgctttaaattgaaggtttctgtctaatgaatttaaaagacaactacataatacttcacgataatgaggttggcaagcacaaggtacagtgatttgattaagttgatggggtctacagcggggagtcagataaaaactgtacatactgcaggcagcattttcctagaagtaacacaataagtaagaaatacttctaaattagtttataacttcttttatagcttctgtacttctttgccattcaagatataatagttttacacaactcaaccctattaaattgtattacaagccttatattcaaacgcttgttagtaaaacagagctacataaaagcatgtccatgaagccttgttgcctgtggcaccgactgatgtatcatgacctacctccctacacacacacacatgcgcgcgcgcacacacacacacacacacacacacacttattccaggattttaaaaaacagcctgacttgttataccatgagaattttaaaaacaaacaaaaacattttaaactatttaaattttctatatgcttacagtaaatatattatggtttacacgtagtgtctagtctagctaagcttaggctcagggtcctatattctttactgtgtatatatttgtcctatatattatttgaacactgagaagtcaccacttggtcctgtattgaatcacacattattaacttgtaaattcgtgtgacatcacactgtacaccgacacaccttcagaaatatttatattactttaaacagagtttctgcaaagtaggctattttgttaaatagagcagatttccacattttagaaaaagtggatcttgctttggttatttcagagtttacatttcaaagggaaggtaagtgtctcagtcagttttctgttgttataacagaatactattatacaccctggccaatttataaagaaaaaaagtattactcacaattctggaactaggaagatcaagagcatggcactggtatctggagatggtagaaggcatcacatagggagtgagcacctgagacagagcgagacgctgggggctgactggctttataatgacccctctcctgataactaacccaccctcacaacaatgacattgtatccattcatgatgtctctgccttggtgacccagccacttcttattcggccctacttcccaacattgttgcaatggggattaaatttccaacccctcaactttttggggacacattcaaaccataggatagaaactggtaatgcaggctatcatatatattttagaaatatactaaatatccaaagcaatgtttacttgcacctaaaaatataaacttccttatcttcaatgctcatgattatttatagctttgttttcccccttttcaataacaagcttctcagaagaatcccccgtacttgatgtctcaatgtccctgctatccacacagcatttagtacttcctgcattctaccctccctcttctagtgccaaattgtgaatgctttcttgatagacatcattgagctcctaggttcatatatgtttgcatgttgttagctgttcattttattggcatctgtgtcaactgacacaatcgtcttagctttactcttgaaactttcatagacttgattatatcttttttgttttaatgaagatatcatctcttcaaatcaacaatagtttcatctctatgactctatttcggggtgaagatcccttctaggggcacacatggcaccatgtttgcagttatggattgcctctctgtatattttaattgtccatttaacagctttatcttctacgcataacttgctcagggacagacactgtgttttattttgtggcatgtataacccctagcatgatgctagcaagtgtgtgatacatatttatcattgcaaaaatgatctagattccctgtttctgtttcttctctttatcttcttctctgctttccctgagcctacaaactaaaatgtcaagtattatttttccgaagtacttacatttttttaatactcttttcattggtgaactaatcaattgccacactttcttctgtgatttgtggtctgctaacagatggctaagcctgtgtttttagtcccaagatccagttctacaattcaagatgactgtctataaactgagatactctcataagctacgtttttcatctttcactgtcaccatttcccttaaagctcttccttttgaactttctcattcttatatatgtattttattttttagttgacaaatgttttgaaatgcatttacattgtgtaatggctcaatctagctaatcaccatatgcattacctcacatacttatcctttttctttcaccatttataaagataaaattttaaggaaactcttaaaatttactctcagcaaatttcaaaataaaatacattgttattaactatagtcactgtgttgagaaacagatcaccagtactcattcttcttatctaaatgaaattttataaaaacactcctccaaaaacaatgttttgaaatatatatacattgtgtaatggctcaatccaactaatcaccttatggcttacttcacatacttgttcttttattttcatcatgagagcccttaaaatttactctcagcaaatttcaaaataaaatatattgttattaaccatagtcaccatgttgggaaacagatcaccagtacttatatctcccacctaaatgaaatgttatatcctttgattggatctccctaagatctcataggccccaggcccttctactttccacttcttttttttttttttaagagatgggatcttgttctgttgcccaggttggagtggagtggcatgatcctggctcactgcacccttaaactcctgagctcaagcaatactccttacttcagcttcctgagcagcgagggccacaggcgtgcatttctttttttagataaattttttatagaggtgaggtcttggtgtattgcccaggctgctctcaaattcctgacctcaagccatctccctgcctcagccaaattgctgggattacaggcatgagctgccactcctgatgtctactctatacttctgtaagttcaacttttttagatttcatgtataagtgagataattcactatttccctttctgtgccggcttatttcacttaacataacgccctccaagttcatctgtgttgtcacaaatgacaagatttccttcgtcttttaaggccaaatagtgtttcagagtgtatataaattacattattttaatccactcatctgctgataggcacttaagtcatttacatatcttgactgctgtaaataatgctgcattgaacatgagagtggagatttctccaacatattgatttcatttcctttagttatatactcagtgctgagattactagatcacatagcagttctatttttaattttgtgaagaacctctgtactattgtccagaatggtttaatactgaataaataagatgccaagtcaataaatttcaaaatttagattttaacatttactcttcttattctcccacattatttaaattgttaaccacagttaattttacttctacaacatcacttcttccttattttagctttcatttccatggacattttttaaacaagtcatcatttatatcaaaacaaaaacaagcaggcaccctgatatctgattaatatttctcacttagatttctagattggattttcacctccttaaatactcccttgagtcccctgacgatcatagctaattgacaacgcaaacttaatctcacacaaaaatctttaactgaaaataggccatgaattatatttgaggtgattatgtaccttaataaatattcatttgggagcaaccattgcagcatcaataggtctatgacagagctattggttaaagatatgtgattataatctcctgggattatgtggaaaagttttaaattttatgataaaataggagtgatgtcgctgatgtgactattccatagttctacttgatttgtaggaatatgatatgtaaaattacagcaatcatcattattattattattatcattatttagagacagggtcttgctgtgttacccagggtggagtgcagtggtgcaatgagaggtcactgaagcctagaactcctgggctcaagagatcctctcgcctcagccttctgagtagctgagaccacaggctcccgccaccatgctgagctaattttaaaaatatataataataataataataatgaaaattgtaggccgggcacggtggctcaggcctgtaatcccagtactttgggaggtcgaggcgggtggatcatccaaggtcaggagtttgagatcagcctggccaacaaggtgaaacctcgtctgtactaaaaatacagaagttagccaggtgtggtgctgggcgcctgcagtcctagctacccgggaggctgaggcacaagaatcacttgaacccaggaggcagaggttgcagtaagccgagatcacgccactgcagtccagcctgggcgacagaatgagactttttctcaaaaaaaaaaaaaaagaatgagaagaaaaaattctacagggccaggcacagtggcttgcacctgtaatcacagtactttgggaggccaagtcgggcagatcacctgagcccaggagttcaaggttgcagtgagctgtgataataccactgcagcccagcgtaggcaatatagtgagactttgtcttttaaaaccatacatatatgtacagacaggtatctatgttttgcttgtcttttgaaaagatgactgtatcctcagtgtgtgcatttacagcccctgacattcaaaattaacctctggcttgaaacctcaattttgtatattttcctcaaatcattatagcgacaccttatgcttcaaaaggtttagattctcaatgctcttcaaaaccccacttgaactgaattgcataggaattttaacaagttggttatagaaaaacagaaacaaaaaacaaaacaaagaaatgttctttctattgctgcatgaaatctagtaataaagatcttcttggtaataaagtagatgattctgtgttacttaaaaatgacagaagtataataatttggagcactaggatatttagagacattaaaggatatatgttttttttaataactcagagtaaaaatcataaaaattttgcgaagattcattttacatatttgaggcctccagtctttacaggtactttttgattctcattaaatattttgaaattcaaggttaaatgaaaaatgctttctttgtaattaagatagatgctaggtaactggagatgccttttatatttttaaaaccaaaatagagaagtaaagctttaaaagtactccaagagaaaattggtattgtcagctcactttatctatatctgatatctgaagtgtgcaaaattaattcaggctttgccacacatagctgttaaagagataagtatagttaatttcagctatactgtaatcaatgacatgagaattaaatttttcatatataaatatctacatcccactgaaaatgtgaagcaagcaaagatgataatataaaagtgcaaaatcaagtttaaggccatccattatccttttctattaacatatatcatgttactattggctcgtctacttttaaacagcaattctcttttatgtaaattaactaagagttcatttagaaatgatatttccccttataagtattcattttgtcagcttaagtaagagccaaatgatctcagatcagattcaatagggaaactgctgaagggaaaataagagaatcatgaaagagaatagaaaatcaatacatagcaattccccagaaattaaatgactctagggtggaggggtcccatgggacatagagagaggtagctggttctaaggatttgtcaggtctaaaccattagcatttccattaccaactcttcttttctgaaggggtattagaatgaattagaacctggtctgagtgcttagatagagcattatcatcaacaaaatcagtaatgttgttagcatcagggaagacacacatggagcattttccctctcctaagcagaaaaaaagatggaaatcttcctaaagactcaggtaatatgaagcatatgtacatgttttcgaggacatgagcccttttgattcataattcagaagtatttcaaatagaaaatccaatgaacaaagcctttttaaaaatgcacttttgacaaaatatttgaaatatacaagaagatatgttcaacatacacttaagtcatgaagcataagatagaattgaatacctgtggagcacaaaacaaataacaaactattattaatatcattgaaataattcctatgtttcttccatgtctcatgctgtcatctttcctgcatcctcactcacagaaaaccatttgtacgtataatttgtttatcttgttcttctctttaataattttattacccaagtaaatatcttttaaaaatattttttattggccgggcgtggtggtcacgcctgtaatcctagcactttgggaggccgaggcgggcagatcacgaggtcaggagatcgagaccatcctggctaacacggtgaaacccccgtctctactaaaaatacaaaaaattagccgggcgtggtggcgggtgcctgtagtcccagctactcgggaggctgaggcgggagaatggcgtgaacccgggaggcggagcttgcagtgagctgagatggcgccactgcactccagcctgggcgacagagtgggagtcactctcaaaaaaaaaaaaaattattttgcttatatttcatgactataagtatagttttatactgtatggaaagttctagggctagatttttttttccacttagaatatatttataagattcatgaaaccatagttcattttcttttaagtgtgtatgtctcctagtgggcacacacaattgtttttagggtattgatatactttggctttgtgtccctacccaaaccccatctctaattgtaatccccatgtgtagaggaagagacctcttggggggtgattggatcacggaggtggcttcctccgtgctgttttcatgatctgttctcaggaaatcttatggtttcaaaagtggcagttttccctgcatactttttctcttttgcttccttgtgaagaaggtgtttgcttcctcttccccttctaccacgtttgtaagtttcctgaggcctccctagccatgtggaactgtgagtcaattaaatctgttttcttataaactacccagtctcgggtagtatctttatgccagggtaaaaaggaactaatacaggtttgtagctataaagaaatttgttgggtcattaaattactttcacaataaaatatttcatttgtactttcttacaccaaagtgccaccacaagctttcaaaatgtaaaacatacattttaatgcattaagttgtttaagaaaaatgtcaaatgacattttaggaagtataataactgtgctgaaattaattaaactatctgattcaaaggttcatcttggcttgaatagcaggaatatcctgcctagctatttagaaatccataggaagagtcattaattattgtgcttttttcccacctaaattgaaataattattttaaatactaattatttaatgctttgctggaactcagaactgtaatcaaaataagtagcaatccactaaaacgatcttttttactgattatttcatcagaaaatttatttctaaattatcaaaatctgtcttaaaatcacatctctttaaacctcaaagaagaatcaaagaaaaaatgtttatgtatgttctattctgctttagagaaaagatatgtatgtagataataattgctaaggaaaaactctggaaaagtcattattcattaggaacctgtagaatccttagctttgctgtctatatgtagccaatcaagcaacataactcatacttattgatgagagctgttttccaagtatgccgctatgatggaaagcacaaaaagcatccatctagaaacattttatcatcaaaaaagatagatagcaatggggatttcttcttagaaaggtagagcagccatgcttgataaaactaaataaagtgaagttttaaatcatcatataaattccatctgcgactccatggacttcagagaacatgtgaatgttgatttgtctgattatgagtattaaagtgaattaaagtaactttcaaactaacatctgtagaatgcataaaaagcataattttccaaaaagttgctagttttttctgctagttgctgactagatctttatgagctatcggagcaaaatgaattctgattgaacaggtaaagaaacgaggctggcagtactttcactgtattttctctgtatctcgtgggactactattagtctgaacttttttgtgttctgtgtcggcagacattcattttgttccttagaccatcttttatttcactggagcattgtacaggatttttttttccaactttttagtagctaaagactatgtgtttgtgattatgtcccaacattaatgtctcatttatctgaggtcaataaatgaacacaagtacatcctttatgatggtgatgatttcagtgaagtgaggcagattattttcacacttcccaaaagagaaaatgctaatcacgatatgcatgagaaaagcattgtggatcacccgaaaacataatgctactcaaaacatctagattctacagcgttcttggccagggttgaaaggaacgcaagggaaacattagcatctgaatacgtagaacaatagaaaggctcatccacatacagttaagtgcgtagttacaaaacacaaggactaaagtactacaatacctgtgacaacacaaaatcctcaagaacataaaactaaatttaatatattactgccaacatcatttagcttattacagatattttcttttaaatcatcttttgcttcattccatacacccatgtatttcataatatacagaatacagaatgcatgacaagaaagttttaaaaacatgcaaggattactattctatgttttaagaaaagtttttatttaggaatagttttatattcatagtcagactgccgagataacagagagtttccatacacccttgaccttctttctcctaatattaggtgcttacgtgactataggagatgtttaaattccaagagattaacattggcaacctactttttactgagctccagattttatttgactttatctgtttttacactgtgtgctttttctttttcaggatttcatcaagggtaccacattacatttaatataatgtctccttactctctctgaactgtgaaagtatgtgaaatagttccttggctttcaagaccttgatatctttgaaaggaactagtcacatatttttatgactgtccctcagttggggagtgcctgacgacttccttaggtttcatcttggctgagtgtccttcttaaaccatcacatgatgagatgcatcctgggatagaattttaatagatagggtagtgtatggatggacagatagatagatacataggtaattatagataggtgggtatgcacagattagactgcaaacatatattttctagttttgtttgcacctagaaacagtaagacctcaataaatcttcatttctaaatgctattcttcaataaaaggaatcatgcctccctggagaaaggattgactgattacagcctccttggagaaagagtactgttaagtgcccttcttatctcatcacatgatgagatgcattctgtgataggattgggtgcatgatgtcagcatgacttactattggtgacgttaaacttaaccacttagttgagatactgtcttcagatgtctcctccataaagtttctatctttttctctttccatactctgaacataagccactaagaatatttcacactcagggtggaagaatataaaactaaatttaatatattgttgccaacattatttagtttcagagatgttttattttaaatcttttgtttccttccatacacccatatatttttataatacacagaatgcatgtaatatacagaatacagatctcacctaataggaggagatttaagtctacctcctgaagggaacagtatctacatatgacgtgggattctgtaaggaaaacttgtctcttctcctttatttatttttaagtaatttccattaaggtattcttgtttattttaagatattcttttttattttaccttttgagtgataacctaatagcacatcattattttgctgctcgaattgtccagggctcctccagcttggctcctgtgtcccattgacacgtggcctccttttaggcttcctaacacttctttattgtattatacttcaagaggttccagggtcatcttgcagtatttcctgacccagcattcaaatcagttagttctttcaccaaggaggtgtgattcctttattagag
